(19) United States
(12) Patent Application Publication
(10) Pub. No.: US 2015/0259674 A1
(43) Pub. Date: Sep. 17, 2015

(54) COMPOSITIONS AND METHODS FOR LONG INSERT, PAIRED END LIBRARIES OF NUCLEIC ACIDS IN EMULSION DROPLETS

(71) Applicant: The Broad Institute, Inc., Cambridge, MA (US)

(72) Inventors: Scott Steelman, Wilmington, MA (US); Robert Nicol, Cambridge, MA (US); Robert Lintner, Amesbury, MA (US)

(21) Appl. No.: 14/664,331

(22) Filed: Mar. 20, 2015

Related U.S. Application Data
(63) Continuation-in-part of application No. PCT/US2013/061182, filed on Sep. 23, 2013.
(60) Provisional application No. 61/703,884, filed on Sep. 21, 2012.
(60) Provisional application No. 61/731,021, filed on Nov. 29, 2012.
(60) Provisional application No. 61/779,964, filed on Mar. 13, 2013.

(51) Int. Cl. C12N 15/10

(52) U.S. Cl. CPC C12N 15/1065; C12N 15/1075

(57) ABSTRACT

The invention provides for methods for uniquely labeling populations of nucleic acids of interest in emulsion droplets using random combinations of oligonucleotides. The labeling methodology of the invention may be used, inter alia, to generate mate pair genomic fragments without the need for circularization. Because the method is independent of circularization, mate pairs can be generated from any length genomic fragment.

### RELATED APPLICATIONS AND INCORPORATION BY REFERENCE

[0001] This application is a continuation-in-part application of international patent application Serial No. PCT/US2013/061182 filed Sep. 23, 2013, which published as PCT Publication No. WO 2014/047556 on Mar. 27, 2014, which claims the benefit of and priority to U.S. Provisional Application Ser. No. 61/779,964, filed Mar. 13, 2013; 61/731,021, filed Nov. 29, 2012; and 61/703,884, filed Sep. 21, 2012. This application is related to U.S. Provisional Application Ser. No. 61/779,999, filed Mar. 13, 2013.

[0002] The foregoing application, and all documents cited therein (“appln cited documents”) and all documents cited or referenced in the appln cited documents, and all documents cited or referenced herein (“herein cited documents”), and all documents cited or referenced in herein cited documents, together with any manufacturer's instructions, descriptions, product specifications, and product sheets for any products mentioned herein or in any document incorporated by reference herein, are hereby incorporated herein by reference, and may be employed in the practice of the invention. More specifically, all referenced documents are incorporated by reference to the same extent as if each individual document was specifically and individually indicated to be incorporated by reference.

### FIELD OF THE INVENTION

[0003] The invention is directed to methods for uniquely labeling populations of nucleic acids of interest in emulsion droplets using random combinations of oligonucleotides.

### BACKGROUND OF INVENTION

[0004] The ability to label and create mate-pair libraries serves multiple purposes in research and industry. However, several limitations exist in current labeling technologies. These limitations include the limited number of distinguishable detectable moieties currently in existence, the amount of time required to uniquely label a plurality of library elements, the requirement, in some instances, for specialized equipment, and the cost involved.

### SUMMARY OF INVENTION

[0005] The invention provides methods and compositions for uniquely labeling nucleic acids, such as DNA, peptides or proteins. One of the major limitations of prior art labeling techniques is the limited number of available unique labels. Typically the number of nucleic acids to be labeled in any given application far exceeds the number of unique labels that are available. The methods of the invention can be used to synthesize essentially an infinite number of unique labels. Moreover, because of their nature, the labels can be easily detected and distinguished from each other, making them suitable for many applications and uses. The methods of the invention also provides for amplifying nucleic acids to increase the number of read pairs properly mated via their unique index combination. Additionally, the methods of the invention allow for each end-labeled nucleic acid to be identically labeled at its 5′ and 3′ ends.

[0006] In one embodiment, provided is a method for labeling a nucleic acid at both its 5′ and 3′ ends with a unique label, which may comprise the steps of:
[0007] a) providing a pool of nucleic acids; and
[0008] b) sequentially end-labeling said nucleic acids with a random combination of n detectable oligonucleotide tags, each of said oligonucleotide tags optionally which may comprise a cohesive overhang of x base pairs in length, wherein each detectable oligonucleotide tag is randomly and independently selected from a number of detectable oligonucleotide tags that is less than the number of nucleic acids, and n is the number of oligonucleotides attached to an end of said nucleic acid,
[0009] wherein said method is performed in emulsion droplets, and wherein each end-labeled nucleic acid is identically labeled at its 5′ and 3′ ends.

[0010] Also provided are labeled nucleic acids and libraries of said nucleic acids.

### BRIEF DESCRIPTION OF DRAWINGS

[0011] Non-limiting embodiments of the present invention will be described by way of example with reference to the accompanying Figures, which are schematic and are not intended to be drawn to scale. For purposes of clarity, not every component is labeled in every figure, nor is every component of each embodiment of the invention shown where illustration is not necessary to allow those of ordinary skill in the art to understand the invention.

[0012] FIG. 1 shows that the efficiency of DNA circularization (cyclization) decreases as fragment length increases.

[0013] FIG. 2 is a schematic depicting the technique for polymerase mediated index addition.

[0014] FIG. 3 is a gel electrophoresis showing ligation of an adapter sequence in either a tube (T) or an emulsion droplet (E).

[0015] FIG. 4 is a schematic depicting the technique for ligation mediated index addition.

[0016] FIG. 5 is a schematic depicting the technique for symmetric ligation-mediated index addition.

[0017] FIG. 6 is a flowchart detailing the criteria for barcode sequence selection.

[0018] FIG. 7 is a schematic depicting the methodology for informatically deriving mate pairs.

[0019] FIG. 8 shows catalyzing ligation by the controlled addition of MgCl₂.

[0020] FIG. 9 shows a stability determination of MgCl₂ in droplets.

[0021] FIG. 10 shows a determination of the optimal ratio of genomic Index:genomic DNA.

[0022] FIG. 11 is a schematic depicting the process of symmetric indexing in emulsion.

[0023] FIG. 12 shows a proof of concept experiment.

[0024] FIG. 13 shows an analysis of E. coli proof of concept libraries.

[0025] FIG. 14 shows an analysis of lambda proof of concept libraries.

[0026] FIG. 15 shows a determination of symmetry of indexing in E. coli proof of concept libraries.

[0027] FIG. 16 is a schematic of a mate pair synthesis process using single stranded genomic DNA as the agent.

[0028] FIG. 17 is a schematic of a mate pair synthesis using droplets and Nextera transposomes as detectable tags.

[0029] FIG. 18 shows the determination of uniformity of blunt-ended indexing.

[0030] FIG. 19 shows impact of ligation efficiency on bioinformatics end association.

[0031] FIG. 20 shows a redesign of index sequences.

[0032] FIG. 21 shows uniformity of indexing.

[0033] FIG. 22 shows amplification of fragment ends via transposome-based selection.

[0034] FIGS. 23a and 23b illustrate enrichment of ends via in vitro transcription.

[0035] FIG. 24 shows amplification of ends via anchored PCR.

[0036] FIG. 25 depicts creating multi-kilobase fragment reads from indexed DNA ends.

### DETAILED DESCRIPTION OF INVENTION

[0037] The methods of the invention easily and efficiently generate libraries of unique labels. Such libraries may be of any size, and are preferably large libraries including hundreds of thousands to billions of unique labels. The libraries of unique labels may be synthesized separately or may be synthesized in real-time (e.g., while in the presence of the nucleic acid). Methods for nucleic acid sequencing and detection of non-nucleic acid detectable moieties are known in the art and are described herein.

[0038] The methods of the invention label nucleic acids in emulsion droplets. The nucleic acid is identically labeled at its 5′ and 3′ ends. Further, the nucleic acids are amplified by a method such as, for example, anchored PCR.

[0039] The invention further provides for methods for creating mate-pair libraries of uniquely labeled nucleic acids such as genomic DNA fragments. The term mate-pair, although specific to certain next generation sequencing technologies, is intended to generically describe a “jumping” library. A jumping library is any DNA construct where the physical genomic distance between sequencing reads can be derived without the need to sequence the entire intervening length of DNA. Depending on the application and/or sequencing technology, some terms frequently used to describe such libraries include (but are not limited to): jumping libraries, distance libraries, long range libraries, linking libraries, long distance linking libraries, mate-pair libraries and long paired-end libraries.

[0040] The invention contemplates that the labels are prepared by sequentially attaching randomly selected oligonucleotides (referred to interchangeably as oligonucleotide tags) to each other. The order in which the oligonucleotides attach to each other is random and in this way the resultant label is unique from other labels so generated. The invention is based, in part, on the appreciation by the inventors that a limited number of oligonucleotides can be used to generate a much larger number of unique labels. The invention therefore allows a large number of labels to be generated (and thus a large number of nucleic acids to be uniquely labeled) using a relatively small number of oligonucleotides.

[0041] The unique labeling strategies of the invention provide methods for generating mate pairs from genomic DNA fragments of virtually any length. This is a significant advantage over the mate pair methods of the prior art which require circularization of the genomic DNA fragment and thus are limited by the length of the fragment. In contrast, the methods of the invention do not rely on circularization of the genomic DNA fragments and thus are able to generate mate pairs from genomic DNA fragments of various lengths.

[0042] Certain aspects of the invention, and the advantages of the invention over previous techniques, are shown in the Figures. FIG. 1 shows that the efficiency of DNA circularization (cyclization) decreases as fragment length increases. A) Predicted probability of circularization for DNA fragments ranging from 1 kb to 100 kb. Probability values are derived using the Jacobson-Stockmayer factor, j=(3/2pbl)3/2 (where l=contour length and b=hydrodynamic segment length), which is a probability density function that describes the effective concentration of one end in the neighborhood of the other end on the same molecule of a random coil polymer. B) Portion of the graph presented in panel A focused on the 1 kb to 12 kb size range. C) Illumina mate-pair libraries were prepared from human genomic DNA fragments of the sizes indicated. Estimated jumping library complexity (shown on the Y-axis) decreases rapidly as fragment size increases due largely to inefficiencies at circularization.

[0043] FIG. 2 shows the technique for polymerase mediated index addition. As seen in FIG. 2, (1) genomic DNA is size selected, end repaired and A-tailed. (2) The biotinylated adapter can only ligate in one orientation on each end of the genomic DNA due to the presence of the T-tail. The adapter is a partial duplex to allow for primer annealing in the next step of the process. (3) Multiple index libraries are created in emulsion and a polymerase-driven fill-in reaction is used to add the index. The index libraries may contain some or all of the key components of the fill in reaction (i.e., MgCl₂, dNTP, polymerase). The library may be comprised of unique single stranded DNA oligonucleotides (oligos). Each oligo will contain 3 distinct moieties: sequence complimentary to adapter (Ad), a unique index sequence (Idx) and a sequence used to “capture” the next index oligo which contains one or more dUTP nucleotides (B′/C′). DNA is diluted to a desired concentration to control the number of molecules per droplet and is merged with the index droplet library. (4) A fill-in reaction is performed creating the complement to the index and the “capture” site. (5) The emulsion is broken and DNA is pooled prior to treatment with USER enzyme causing the “capture” portion of the indexed oligo to be digested/released from the nascent strand which does NOT contain dUTP. (6-8) The process of DNA dilution, index addition, fill-in, pool, and USER enzyme treatment is repeated for the desired number of cycles, each time adding one new index to the end of the DNA. (9) After the final index addition, DNA is fragmented and the ends are collected via streptavidin beads. All fragments are ligated to technology specific sequencing adapters and ends are informatically paired based on their unique string of indexes.

[0044] FIG. 3 is a gel electrophoresis showing ligation of an adapter sequence in either a tube (T) or an emulsion droplet (E).

[0045] FIG. 4 is a schematic of the technique for ligation mediated index addition. As shown in FIG. 4. (1) Genomic DNA is size selected, end repaired and A-tailed. (2) The biotinylated adapter can only ligate in one orientation on each end of the genomic DNA due to the presence of the T-tail. The adapter may be blunt ended or it may be a partial duplex with a sequence specific cohesive overhang to allow for index annealing in the next step of the process. (3) Multiple index libraries are created in emulsion and a ligation reaction is performed to add the index. The index libraries may contain some or all of the key components of the ligation reaction (i.e., MgCl₂, dNTP, ligase). Each droplet will contain many copies of an individual (unique) index sequence. DNA is diluted to a desired concentration to control the number of genomic fragments per droplet and is then joined to the index library allowing the ligation reaction to occur. Following ligation, the emulsion is broken and DNA is pooled, purified and prepared so that it can accept the next index. (4-6) The process of DNA dilution, index addition, ligation, pooling, clean-up and phosphorylation is repeated for the desired number of cycles, each time adding one new index to the end of the DNA. (7) After the final index addition, DNA is fragmented and the ends are collected via streptavidin beads. All fragments are ligated to technology specific sequencing adapters and ends are informatically paired based on their unique string of indexes.

[0046] FIG. 5 depicts the technique for symmetric ligation-mediated index addition. (1) Genomic DNA is size selected, end repaired and A-tailed. (2) The biotinylated adapter can only ligate in one orientation on each end of the genomic DNA due to the presence of the T-tail. The adapter may be blunt ended or it may be a partial duplex with a sequence specific cohesive overhang to allow for index annealing in the next step of the process. (3) Multiple index libraries are created and a ligation reaction is performed to add the index. Following ligation, DNA molecules are pooled, purified and prepared for the next round of ligation. (4) This process is repeated Y number of times. The total “diversity” of the population of unique index combinations is dictated by the number of indexes used raised to the power of the number of cycles performed. For example, 3 round of index ligation using a 1152 element array creates 1152³ or 1,528,823,808 combinations. (5) After the final index addition, DNA is fragmented and the ends are collected via streptavidin beads. (6) Sheared DNA fragments are end repaired as needed and ligated to technology specific sequencing adapters. Following sequencing, the ends are informatically paired based on their unique string of indexes.

[0047] FIG. 6 is a flowchart detailing the criteria for barcode sequence selection.

[0048] Though the set started with a hypothetical pool of >1 million random sequences, the filtering criteria eliminated over 99% of the random sequences to arrive at a collection of ˜5,000 barcode sequences.

[0049] FIG. 7 provides the methodology for informatically deriving mate pairs. Left Panel: For a standard Illumina mate-pair library, each construct is sequenced using two reads. Since both ends of the parent genomic DNA fragment are contained in a single construct, two reads (i.e., a single read pair) are sufficient to establish a mate-pair. Right Panel: Unlike a standard library, a symmetrically indexed library requires a total of 4 reads (i.e., 2 read pairs) in order to establish a mate-pair. For a given construct, one read will contain the index information while the other is genomic DNA (i.e, one read pair defines one “half” of the mate-pair). For each construct in the library, the algorithm must search the data set to identify appropriately matching indexing combinations. Once the index combinations are matched, their corresponding genomic reads can be positioned relative to the genome.

[0050] FIG. 8 shows catalyzing ligation by the controlled addition of MgCl₂. In order to prevent spontaneous ligation (concatamerization) of genomic DNA fragments, it is necessary to prepare the DNA in a solution that lacks one or more of the key components necessary to catalyze a ligation reaction. Due to stability and cost issues, sequestration of MgCl₂ in the index droplets would be preferable over other key components (i.e., ligase enzyme and ATP). A single 380 bp restriction fragment was generated from pBR322 plasmid DNA and prepared it such that it can only ligate to itself in one orientation. Thus, a 760 bp ligated product is easily distinguishable from the unligated 380 bp product. A 10× modified ligation buffer lacking MgCl₂ was prepared but containing 500 mM Tris-HCl pH 7.5, 100 mM dithiothreitol and 10 mM ATP. For lanes 1-3 and lanes 7 and 8, reactions were prepared as indicated, incubated for 1 hour at room temperature, purified and run on an Agilent DNA 1000 chip. For lanes 4, 5 and 6, reactions were prepared as indicated and incubated for 1 hour at room temperature. Following this initial incubation, either water (lane 4), MgCl₂ (lane 5) or T4 DNA ligase (lane 6) were added to the reaction. Samples were then allowed to incubate for an additional 1 hour at room temperature before being purified and run on an Agilent DNA 1000 chip. No ligated product was observed in those reactions lacking MgCl₂ (lanes 1 and 4). Upon addition of 50 mM MgCl₂ at either time=0 (lane 2) or time=1 hour (lane 5), ligated product was observed.

[0051] FIG. 9 shows stability determination of MgCl₂ in droplets. Droplets containing 50 mM, 10 mM or 1 mM concentrations of MgCl₂ were prepared and stored at +4° C. for ˜4.5 days. Droplets were then broken and the aqueous phase was collected from each droplet “library” and transferred into fresh 1.5 ml tubes. Ligation reactions containing IX Modified Ligation buffer (i.e., buffer lacking MgCl₂), T4 DNA ligase and 380 bp control fragment DNA were prepared. Aqueous phase recovered from the various droplet libraries (lanes 1-3) or non-emulsified MgCl₂ (lanes 4-6) was added to the various ligation reactions. The 50 mM and 10 mM reactions appeared to perform equally well while a marked reduction in the amount of ligated product was observed for the 1 mM condition. Importantly, the MgCl₂ released from the droplet library (lanes 1-3) appeared equally capable of catalyzing the ligation reaction as freshly added MgCl₂ (lanes 4-6). NOTE: The 50 mM droplet condition looks slightly less intense on the gel image due to slightly less material being loaded on the gel for that lane.

[0052] FIG. 10 represents a determination of the optimal ratio of genomic Index:genomic DNA. Lambda genomic DNA was sheared to a mean size of ˜300 bp using a Covaris S2 instrument. The genomic DNA was then end repaired and utilized in a ligation reaction containing variable molar ratios of Index:gDNA. Following index ligation, samples were end repaired, A-tailed and ligated to Illumina adapters. Samples were pooled and sequenced on an Illumina MiSeq. The percentage of reads where indexed was observed is shown. NOTE: The indexes used in this experiment were blunt ended 20 bp sequences.

[0053] FIG. 11 provides the process of symmetric indexing in emulsion. Index libraries are prepared in an emulsion. The droplets carrying index also contain a concentration of MgCl₂ such that when they are joined with a solution of DNA, ligase buffer and ligase enzyme, the final concentration of MgCl₂ in a given reaction is 50 mM. Although many molecules/particles receive the same index in any given round of addition, the probability that any two identically indexed molecules/particles will travel together in a subsequent round of index addition is extremely low. After each round of index addition, the emulsion is broken and DNA samples are purified and prepared for the next round of index addition.

[0054] FIG. 12 shows a proof of concept experiment. E. coli genomic DNA was sheared to a mean size of approximately 300 bp using a Covaris S2 instrument, end repaired, A-tailed and ligated to the cap adapter. Lambda genomic DNA was prepared similarly, but was not sheared. Genomic DNA fragments were then subjected to 1, 2 or 3 rounds of blunt-ended index ligation in bulk (i.e., in microcentrifuge tubes). E. coli fragments were not sheared following index ligation while lambda fragments were sheared to approximately 500 bp using a Covaris S2 instrument. Cap containing fragments were selected via incubation with paramagnetic streptavidin M-280 beads, end repaired, A-tailed and ligated to Illumina sequencing adapters. Samples were pooled and sequenced on an Illumina MiSeq using standard paired end chemistry.

[0055] FIG. 13 is an analysis of E. coli proof of concept libraries. E. coli genomic DNA libraries were prepared in duplicate (Cond1 and Cond2) as described above (see FIG. 12). Libraries were pooled and sequenced with a 101 bp paired read on a single MiSeq run. Paired reads that passed filter were analyzed together as a single population. (A) Reads were broken down into 20 bp units (i.e., positions) and checked for the presence of index sequences. The expected outcome at a given position is shown (Idx=index, Ad=capping adapter, E=E. coli genomic DNA). (B) The number of reads containing index at a given position are shown. (C) The percent of reads containing index at a given position is shown.

[0056] FIG. 14 provides an analysis of lambda proof of concept libraries. Lambda phage genomic DNA libraries were prepared in duplicate (Cond1 and Cond2) as described above (see FIG. 12). Libraries were pooled and sequenced with a 101 bp paired read on a single MiSeq run. Paired reads that passed filter were analyzed together as a single population. (A) Reads were broken down into 20 bp units (i.e., positions) and checked for the presence of index sequences. The expected outcome at a given position is shown (Idx=index, Ad=capping adapter, L=lambda genomic DNA). (B) The number of reads containing index at a given position are shown. (C) The percent of reads containing index at a given position is shown. The percentages shown are corrected for the fact that one half of the reads will necessarily be the genomic “end” of the library insert.

[0057] FIG. 15 shows a determination of symmetry of indexing in E. coli proof of concept libraries. E. coli genomic DNA was prepared as described above (see FIG. 12). Libraries subjected to 1 (panels 1A and 1B), 2 (panels 2A and 2B) or 3 (panels 3A and 3B) rounds of index ligation are shown. All data that passed filter was analyzed as read pairs which were then broken down into 20 bp units (i.e., positions) and checked for the presence of index sequences. Positions where index sequences were detected are depicted by green boxes; positions where indexes were not detected are depicted by white boxes. The expected outcome for each library is denoted by a green asterisk.

[0058] FIG. 16 is a schematic representation of a mate pair synthesis process using single stranded genomic DNA as the agent. Each droplet may comprise both strands of the genomic fragment. As shown in the Figure, the strands are identically labeled at one end.

[0059] FIG. 17 is a schematic of a mate pair synthesis using droplets and Nextera transposomes as detectable tags.

[0060] FIG. 18 shows the determination of uniformity of blunt-ended indexing. C57BL/6J mouse genomic DNA was sheared to approximately 40 kb using a Genemachines Hydroshear. Samples were run on a 0.7% agarose gel and fragments of approximately 31 kb and 38 kb were collected and purified separately. All fragments were then end repaired, A-tailed and ligated to the biotinylated cap adapter. Fragments were then ligated to blunt-ended index sequences contained in a droplet library using the Raindance Thunderstorm instrument. Following each round of index ligation, the emulsion was broken and samples were end repaired and purified for use in subsequent rounds of ligation. A total of 3 rounds of index ligation were performed. After the final round of index ligation, samples were sheared to ˜500 bp in length using a Covaris S2 instrument. Fragments containing the biotinylated cap adapter were selected using streptavidin M-280 beads, end repaired, A-tailed and ligated to Illumina sequencing adapters. Samples were then sequenced using an Illumina MiSeq instrument. The location of the cap sequence within a given read was determined. The total number of reads with cap sequence identified at a given position within the read are shown. Significant populations of reads where the cap was located at bp 1 (i.e., no index present), bp 21 (1 index), bp 41 (2 indexes) and bp 61 (3 indexes) were observed for both the 31 kb and 38 kb libraries.

[0061] FIG. 19 describes impact of ligation efficiency on bioinformatics end association. Upon analysis of the indexed mouse libraries (see FIG. 18), it was observed that clear populations of reads carrying 1, 2 or 3 indexes were present in the final library. The fact that multiple distinct populations were observed indicates a lack of symmetry in the indexing protocol. This presents a challenge to the informatic association of mate pairs since, for example, a read carrying 3 indexes may have its mate in the pool of reads carrying 3, 2 or 1 indexes. Thus, the likelihood of correctly pairing reads decreases as the number of indexes present decreases.

[0062] FIG. 20 is a redesign of index sequences to improve ligation efficiency. The cap adapter and all barcodes were redesigned to carry a 4-bp cohesive overhang on either side of the barcode (but only on one side of the cap adapter). Barcodes were separated into 4 different populations (A, B, C and D) depending on the sequence of the 4-bp cohesive overhang. The sequence of the cohesive overhang for each population is shown.

[0063] FIG. 21 shows uniformity of indexing using cohesive overhang indexing. E. coli and lambda genomic DNA libraries were prepared as described above (see FIG. 12), but this time using cohesive overhang indexes in conjunction with a cohesive overhang ended cap adapter. Reads were analyzed as before and the location of the biotinylated cap within the read was determined. The total number of reads with cap sequence identified at a given position within the read are shown. This analysis revealed a clear improvement in the homogeneity of the indexed read population where the vast majority of the reads from the cohesive overhang indexed libraries carried 3 indexes

[0064] FIGS. 22 to 24 show examples of fragment amplification techniques. FIG. 22 shows transposome-based selection and amplification of ends creating many fragments where both ends are flanked by an Illumina P5 sequence. FIG. 23 shows enrichment of ends via in vitro transcription wherein T7 RNA polymerase is used in order to amplify both ends of a given molecule. FIG. 24 shows amplification using an anchored PCR technique described in Example 3.

[0065] Thus, in one aspect, the invention provides a method which may comprise generating a plurality of unique labels by attaching at least two, randomly selected, detectable oligonucleotide tags to each other in a sequential manner, and associating each unique label with a separate nucleic acid.

[0066] In some embodiments, the at least two detectable tags are attached to each other using ligation, polymerization, or a combination thereof.

[0067] In some embodiments, the unique label is generated in an emulsion droplet or in a series of emulsion droplets. In some embodiments, the library of uniquely-labeled nucleic acids is generated using an emulsion droplet or a series of emulsion droplets.

[0068] In another aspect, the invention provides a method which may comprise sequentially attaching at least two detectable oligonucleotide tags to a 5′ and/or 3′ end of a first nucleic acid, wherein each detectable oligonucleotide tag is randomly selected from a plurality of detectable oligonucleotide tags, thereby generating a second nucleic acid which may comprise the first nucleic acid attached at its 5′ and/or 3′ end with a unique combination of detectable oligonucleotide tags.

[0069] In some embodiments, the first nucleic acid is a genomic DNA fragment.

[0070] In another aspect method which may comprise sequentially end-labeling nucleic acids in a plurality, at their 5′ and 3′ ends, with a random combination of n detectable oligonucleotide tags, wherein each end-labeled nucleic acid is (a) identically labeled at its 5′ and 3′ ends, and (b) uniquely labeled relative to other nucleic acids in the plurality, wherein each detectable oligonucleotide tags is randomly and independently selected from a number of detectable oligonucleotide tags that is less than the number of nucleic acids, and n is the number of oligonucleotides attached to an end of a nucleic acid.

[0071] In some embodiments, the number of oligonucleotides is 10-fold, 100-fold, 1000-fold, or 10000-fold less than the number of nucleic acids.

[0072] In some embodiments, the method further may comprise fragmenting end-labeled nucleic acids into at least a 5′ fragment which may comprise the 5′ end of the nucleic acid attached to the random combination of n oligonucleotide tags and into a 3′ fragment which may comprise the 3′ end of the nucleic acid attached to the random combination of n oligonucleotide tags.

[0073] In some embodiments, the 5′ and 3′ fragments are about 10-1000 bases (base pairs) in length, or about 10-500 bases in length, or about 10-200 bases in length. In some embodiments, the method further may comprise sequencing the 5′ and 3′ fragments.

[0074] In another aspect, the invention provides a method which may comprise (a) end-labeling two or more first subsets of nucleic acids with a detectable oligonucleotide tag to produce nucleic acids within a subset that are identically end-labeled relative to each other and uniquely end-labeled relative to nucleic acids in other subsets; (b) combining two or more subsets of uniquely end-labeled nucleic acids to form a pool of nucleic acids, wherein the pool may comprise two or more second subsets of nucleic acids that are distinct from the two or more first subsets of nucleic acids; (c) identically end-labeling two or more second subsets of nucleic acids with a second detectable oligonucleotide tag to produce nucleic acids within a second subset that are uniquely labeled relative to nucleic acids in the same or different second subsets; and (d) repeating steps (b) and (c) until a number of unique end-label combinations is generated that exceeds the number of starting nucleic acids.

[0075] In another aspect, the invention provides a method which may comprise (a) providing a pool of nucleic acids; (b) separating the pool of nucleic acids into sub-pools of nucleic acids; (c) end-labeling nucleic acids in each sub-pool of with one of m₁ detectable oligonucleotide tags thereby producing sub-pools of labeled nucleic acids, wherein nucleic acids in a sub-pool are identically end-labeled to each other, (d) combining sub-pools of labeled nucleic acids to create a pool of labeled nucleic acids; (e) separating the pool of labeled nucleic acid molecules into second sub-pools of labeled nucleic acids; (f) repeating steps (c) to (e) n times to produce nucleic acids end-labeled with n detectable oligonucleotide tags wherein the pool in (a) consists of a number of nucleic acids that is less than (m₁)(m₂)(m₃) . . . (mₙ).

[0076] In another aspect, the invention provides a method which may comprise (a) providing a population of library droplets which may comprise nucleic acids, wherein each droplet may comprise a nucleic acid; (b) fusing each individual library droplet with a single index droplet from a plurality of m₁ index droplets, each index droplet which may comprise a plurality of one unique detectable oligonucleotide tag; (c) end-labeling the nucleic acid with the unique detectable oligonucleotide tag in a fused droplet; (d) harvesting end-labeled nucleic acids from the fused droplets and generating another population of library droplets which may comprise end-labeled nucleic acids; and (e) repeating steps (b) to (d) n times to produce nucleic acids end-labeled with n unique detectable oligonucleotide tag, wherein the n unique detectable oligonucleotide tags generate an (m₁)(m₂)(m₃) . . . (mₙ) number of combinations that is greater than the number of starting nucleic acids.

[0077] In some embodiments, end-labeling may comprise ligation of the unique oligonucleotide tag with the nucleic acid. In some embodiments, the unique oligonucleotide tag is double-stranded. In some embodiments, the method further may comprise phosphorylating the nucleic acids between steps (b) and (c).

[0078] In some embodiments, end-labeling may comprise a polymerase-mediated fill-in reaction. In some embodiments, the polymerase-mediated fill-in reaction may comprise (a) producing a single-stranded cohesive overhang on the nucleic acid, wherein the cohesive overhang is complementary to one end of the unique detectable oligonucleotide tag; (b) annealing the complementary end of the unique oligonucleotide tag to the single-stranded cohesive overhang such that at least one nucleotide of the unique detectable oligonucleotide tag is not annealed to the nucleic acid, producing a unique detectable oligonucleotide tag cohesive overhang; and (c) extending the single-stranded cohesive overhang of (a) using a polymerase and nucleotides complementary to the unique detectable oligonucleotide tag cohesive overhang to produce a double-stranded unique detectable oligonucleotide tag.

[0079] In some embodiments, the single-stranded cohesive overhang on the nucleic acid is produced by a USER enzyme. In some embodiments, the unique detectable oligonucleotide tag is single-stranded.

[0080] In some embodiments, an oligonucleotide adapter is added to the nucleic acids before labeling with the unique detectable oligonucleotide tags. In some embodiments, the adapter may comprise biotin. In some embodiments, the adapter may comprise a thymidine tail cohesive overhang.

[0081] In some embodiments, labeling occurs at the 5′ and 3′ ends of the nucleic acid. In some embodiments, labeling occurs at the 5′ or the 3′ end of the nucleic acid.

[0082] In some embodiments, the nucleic acids are genomic DNA, cDNA, PCR products, or fragments thereof.

[0083] In some embodiments, the method further may comprise fragmenting uniquely end-labeled nucleic acids. In some embodiments, the method further may comprise sequencing the uniquely end-labeled nucleic acids.

[0084] In some embodiments, the number of nucleic acids in the pool is at least two times greater than the number of unique oligonucleotide tags.

[0085] In another aspect, the invention provides a method which may comprise (a) providing a population of library droplets which may comprise nucleic acids, wherein each droplet may comprise a nucleic acids end-labeled on its 5′ and 3′ ends with oligonucleotide label, wherein the oligonucleotide label on the 5′ end (the 5′ oligonucleotide label) and the oligonucleotide on the 3′ end (the 3′ oligonucleotide label) may comprise a nucleotide cohesive overhang, and wherein the nucleotide cohesive overhang on the 5′ oligonucleotide label is complementary to the nucleotide cohesive overhang on the 3′ oligonucleotide label; (b) fusing each individual library droplet with a droplet which may comprise a DNA fragmenting enzyme, thereby producing a fused droplet; (c) fragmenting the nucleic acid with the 5′ and 3′ oligonucleotide labels in the fused droplet, thereby producing a fused droplet which may comprise a nucleic acid fragment which may comprise the 5′ oligonucleotide label and a nucleic acid fragment which may comprise the 3′ oligonucleotide label; and (d) ligating the 5′ oligonucleotide label and the 3′ oligonucleotide label nucleic acid, thereby ligating the nucleic acid fragment which may comprise the 5′ oligonucleotide label and the nucleic acid fragment which may comprise the 3′ oligonucleotide label, thereby producing a ligated nucleic acid.

[0086] In some embodiments, the 5′ oligonucleotide label and/or the 3′ oligonucleotide may comprise a biotin label.

[0087] In some embodiments, the method further may comprise (e) sequencing the ligated nucleic acid.

[0088] In some embodiments, the DNA fragmenting agent is Nextera.

[0089] In another aspect, the invention provides a method which may comprise (a) providing a population of library droplets which may comprise nucleic acids, wherein each droplet may comprise a nucleic acid which may comprise an oligonucleotide adapter; (b) melting the nucleic acid; (c) fusing each individual library droplet which may comprise a melted nucleic acid with a single index droplet from a plurality of m1 index droplets, each index droplet which may comprise a first unique single-stranded detectable oligonucleotide tag, wherein the first unique single-stranded detectable oligonucleotide tag may comprise a region complementary to the oligonucleotide adapter, (d) annealing the first unique single-stranded detectable oligonucleotide tag to the nucleic acid and performing a fill-in reaction, thereby producing an end-labeled nucleic acid; (e) harvesting end-labeled nucleic acids from the fused droplets and generating another population of library droplets, wherein each droplet may comprise an end-labeled nucleic acid; (f) melting the end-labeled nucleic acid; (g) fusing each individual library droplet which may comprise a melted end-labeled nucleic acid with a single index droplet from a plurality of m2 index droplets, each index droplet which may comprise a second unique single-stranded detectable oligonucleotide tag, wherein the second unique single-stranded detectable oligonucleotide tag may comprise a region complementary to the first unique single-stranded detectable oligonucleotide tag; (h) annealing the second unique single-stranded detectable oligonucleotide tag to the nucleic acid and performing a fill-in reaction, thereby producing an end-labeled nucleic acid; (i) harvesting end-labeled nucleic acid molecules from the fused droplets and generating another population of library droplets which may comprise end-labeled nucleic acids; and (j) repeating steps (f) to (i) n times to produce nucleic acids end-labeled with n detectable oligonucleotide tags, wherein the n detectable oligonucleotide tags generate an (m₁)(m₂)(m₃) . . . (mₙ) number of combinations that is greater than the number of starting nucleic acids.

[0090] In another aspect, the invention provides a method which may comprise sequencing a pair of genomic nucleic acid fragments, wherein the genomic nucleic acid fragments are attached to identical unique labels at one of their ends that indicates the genomic nucleic acid fragments were separated by a known distance in a genome prior to fragmentation.

[0091] In some embodiments, the pair of nucleic acid fragments were separated by greater than 10 kb in the genome prior to fragmentation.

[0092] In some embodiments, the pair of nucleic acid fragments were separated by greater than 40 kb in the genome prior to fragmentation.

[0093] In some embodiments, the method further may comprise generating the pair of genomic nucleic acid fragments by fragmenting nucleic acids which may comprise genomic sequence and identical non-genomic sequence at their 5′ and 3′ ends.

[0094] In another aspect, the invention provides a composition which may comprise a plurality of paired nucleic acid fragments attached to unique labels at one end, wherein paired nucleic acid fragments:

[0095] (a) share an identical unique label at one end that is unique in the plurality, and (b) were separated from each other in a genome by a known distance prior to fragmentation.

[0096] In some embodiments, paired nucleic acid fragments were separated by greater than 10 kb in the genome prior to fragmentation. In some embodiments, paired nucleic acid fragments were separated by greater than 40 kb in the genome prior to fragmentation.

[0097] In another aspect, the invention provides a composition which may comprise a plurality of paired genomic nucleic acid fragments produced any of the foregoing methods.

[0098] The present invention further encompasses methods of making and/or using one or more of the embodiments described herein.

[0099] Other advantages and novel features of the present invention will become apparent from the following detailed description of various non-limiting embodiments of the invention when considered in conjunction with the accompanying Figures. In cases where the present specification and a document incorporated by reference include conflicting and/or inconsistent disclosure, the present specification shall control. If two or more documents incorporated by reference include conflicting and/or inconsistent disclosure with respect to each other, then the document having the later effective date shall control.

[0100] As used herein, “agent” or “agents” refers to a nucleic acid. The nucleic acid agent may be single-stranded (ss) or double-stranded (ds), or it may be partially single-stranded and partially double-stranded. Nucleic acid agents include but are not limited to DNA such as genomic DNA fragments, PCR and other amplification products, RNA, cDNA, and the like. Nucleic acid agents may be fragments of larger nucleic acids such as but not limited to genomic DNA fragments.

### Association of Labels and Agents

[0101] An agent of interest may be associated with a unique label. As used herein, “associated” refers to a relationship between the agent and the unique label such that the unique label may be used to identify the agent, identify the source or origin of the agent, identify one or more conditions to which the agent has been exposed, etc. A label that is associated with an agent may be, for example, physical attached to the agent, either directly or indirectly, or it may be in the same defined, typically physically separate, volume as the agent. A defined volume may be an emulsion droplet, a well (of for example a multiwell plate), a tube, a container, and the like. It is to be understood that the defined volume will typically contain only one agent and the label with which it is associated, although a volume containing multiple agents with multiple copies of the label is also contemplated depending on the application.

[0102] An agent may be associated with a single copy of a unique label or it may be associated with multiple copies of the same unique label including for example 2, 3, 4, 5, 6, 7, 8, 9, 10, 100, 1000, 10,000, 100,000 or more copies of the same unique label. In this context, the label is considered unique because it is different from labels associated with other, different agents.

[0103] Attachment of labels to agents may be direct or indirect. The attachment chemistry will depend on the nature of the agent and/or any derivatisation or functionalisation applied to the agent. For example, labels can be directly attached through covalent attachment. The label may include a moiety, which may be a non-nucleotide chemical modification, to facilitate attachment. By way of non-limiting example, the label may include methylated nucleotides, uracil bases, phosphorothioate groups, ribonucleotides, diol linkages, disulphide linkages, etc., to enable covalent attachment to an agent.

[0104] In another example, a label can be attached to an agent via a linker or in another indirect manner. Examples of linkers, include, but are not limited to, carbon-containing chains, polyethylene glycol (PEG), nucleic acids, monosaccharide units, and peptides. The linkers may be cleavable under certain conditions. Cleavable linkers are discussed in greater detail herein.

[0105] Methods for attaching nucleic acids to each other, as for example attaching nucleic acid labels to nucleic acid agents, are known in the art. Such methods include but are not limited to ligation and polymerase-mediated attachment methods (see, e.g., U.S. Pat. Nos. 7,863,058 and 7,754,429; Green and Sambrook. Molecular Cloning: A Laboratory Manual, Fourth Edition, 2012; Current Protocols in Molecular Biology, and Current Protocols in Nucleic Acid Chemistry, all of which are incorporated herein by reference).

### Detectable Oligonucleotide Tags

[0106] The unique labels of the invention are, at least in part, nucleic acid in nature, and are generated by sequentially attaching two or more detectable oligonucleotide tags to each other. As used herein, a detectable oligonucleotide tag is an oligonucleotide that can be detected by sequencing of its nucleotide sequence and/or by detecting non-nucleic acid detectable moieties it may be attached to.

[0107] The oligonucleotides tags are typically randomly selected from a diverse plurality of oligonucleotide tags. In some instances, an oligonucleotide tag may be present once in a plurality or it may be present multiple times in a plurality. In the latter instance, the plurality of tags may be comprised of a number of subsets each which may comprise a plurality of identical tags. In some important embodiments, these subsets are physically separate from each other. Physical separation may be achieved by providing the subsets in separate droplets from an emulsion. It is the random selection and thus combination of oligonucleotide tags that results in a unique label. Accordingly, the number of distinct (i.e., different) oligonucleotide tags required to uniquely label a plurality of agents can be far less than the number of agents being labeled. This is particularly advantageous when the number of agents is large (e.g., when the agents are members of a library).

[0108] As used herein, the term “oligonucleotide” refers to a nucleic acid such as deoxyribonucleic acid (DNA), ribonucleic acid (RNA), or DNA/RNA hybrids and includes analogs of either DNA or RNA made from nucleotide analogs known in the art (see, e.g. U.S. Patent or Patent Application Publications: U.S. Pat. No. 7,399,845, U.S. Pat. No. 7,741,457, U.S. Pat. No. 8,022,193, U.S. Pat. No. 7,569,686, U.S. Pat. No. 7,335,765, U.S. Pat. No. 7,314,923, U.S. Pat. No. 7,335,765, and U.S. Pat. No. 7,816,333. US 20110009471, the entire contents of each of which are incorporated herein by reference). Oligonucleotides may be single-stranded (such as sense or antisense oligonucleotides), double-stranded, or partially single-stranded and partially double-stranded.

[0109] A unique nucleotide sequence may be a nucleotide sequence that is different (and thus distinguishable) from the sequence of each detectable oligonucleotide tag in a plurality of detectable oligonucleotide tags. A unique nucleotide sequence may also be a nucleotide sequence that is different (and thus distinguishable) from the sequence of each detectable oligonucleotide tag in a first plurality of detectable oligonucleotide tags but identical to the sequence of at least one detectable oligonucleotide tag in a second plurality of detectable oligonucleotide tags. A unique sequence may differ from other sequences by multiple bases (or base pairs). The multiple bases may be contiguous or non-contiguous. Methods for obtaining nucleotide sequences (e.g., sequencing methods) are described herein and/or are known in the art.

[0110] In some embodiments, detectable oligonucleotide tags comprise one or more of a ligation sequence, a priming sequence, a capture sequence, and a unique sequence (optionally referred to herein as an index sequence). A ligation sequence is a sequence complementary to a second nucleotide sequence which allows for ligation of the detectable oligonucleotide tag to another entity which may comprise the second nucleotide sequence, e.g., another detectable oligonucleotide tag or an oligonucleotide adapter. A priming sequence is a sequence complementary to a primer, e.g., an oligonucleotide primer used for an amplification reaction such as but not limited to PCR. A capture sequence is a sequence capable of being bound by a capture entity. A capture entity may be an oligonucleotide which may comprise a nucleotide sequence complementary to a capture sequence, e.g. a second detectable oligonucleotide tag. A capture entity may also be any other entity capable of binding to the capture sequence, e.g. an antibody or peptide. An index sequence is a sequence which may comprise a unique nucleotide sequence and/or a detectable moiety as described above.

[0111] “Complementary” is a term which is used to indicate a sufficient degree of complementarity between two nucleotide sequences such that stable and specific binding occurs between one and preferably more bases (or nucleotides, as the terms are used interchangeably herein) of the two sequences. For example, if a nucleotide in a first nucleotide sequence is capable of hydrogen bonding with a nucleotide in second nucleotide sequence, then the bases are considered to be complementary to each other. Complete (i.e., 100%) complementarity between a first nucleotide sequence and a second nucleotide is preferable, but not required for ligation, priming, or capture sequences.

[0112] Table 1 below provides examples of certain oligonucleotide tags of the invention:

TABLE 1

| Tag | Full Oligo Sequence (Top) | Full Oliqo Sequence (Bot) |
|---|---|---|
| GGATATCTGTGGATATCTGT | /5Phos/CAGAGGATATCTGTGGATATCTGT | /5Phos/CGAAACAGATATCCACAGATATCC |
| GGCTGCCATAGGCTGCCATA | /5Phos/CAGAGGCTGCCATAGGCTGCCATA | /5Phos/CGAATATGGCAGCCTATGGCAGCC |
| GGTATGTCAAGGTATGTCAA | /5Phos/CAGAGGTATGTCAAGGTATGTCAA | /5Phos/CGAATTGACATACCTTGACATACC |
| GGTGAAGGACGGTGAAGGAC | /5Phos/CAGAGGTGAAGGACGGTGAAGGAC | /5Phos/CGAAGTCCTTCACCGTCCTTCACC |
| GTACCAGCATGTACCAGCAT | /5Phos/CAGAGTACCAGCATGTACCAGCAT | /5Phos/CGAAATGCTGGTACATGCTGGTAC |
| GTATACATCCGTATACATCC | /5Phos/CAGAGTATACATCCGTATACATCC | /5Phos/CGAAGGATGTATACGGATGTATAC |
| GTATCGCTCAGTATCGCTCA | /5Phos/CAGAGTATCGCTCAGTATCGCTCA | /5Phos/CGAATGAGCGATACTGAGCGATAC |
| GTCCGATGGAGTCCGATGGA | /5Phos/CAGAGTCCGATGGAGTCCGATGGA | /5Phos/CGAATCCATCGGACTCCATCGGAC |
| GTGTGGAATTGTGTGGAATT | /5Phos/CAGAGTGTGGAATTGTGTGGAATT | /5Phos/CGAAAATTCCACACAATTCCACAC |
| GTGTGGCAGAGTGTGGCAGA | /5Phos/CAGAGTGTGGCAGAGTGTGGCAGA | /5Phos/CGAATCTGCCACACTCTGCCACAC |
| GTTACGGTGAGTTACGGTGA | /5Phos/CAGAGTTACGGTGAGTTACGGTGA | /5Phos/CGAATCACCGTAACTCACCGTAAC |
| GTTCGTACATGTTCGTACAT | /5Phos/CAGAGTTCGTACATGTTCGTACAT | /5Phos/CGAAATGTACGAACATGTACGAAC |
| TAACCGGTAATAACCGGTAA | /5Phos/CAGATAACCGGTAATAACCGGTAA | /5Phos/CGAATTACCGGTTATTACCGGTTA |
| TACAGAGTCATACAGAGTCA | /5Phos/CAGATACAGAGTCATACAGAGTCA | /5Phos/CGAATGACTCTGTATGACTCTGTA |
| TACCGAGATATACCGAGATA | /5Phos/CAGATACCGAGATATACCGAGATA | /5Phos/CGAATATCTCGGTATATCTCGGTA |
| TACGCATCGCTACGCATCGC | /5Phos/CAGATACGCATCGCTACGCATCGC | /5Phos/CGAAGCGATGCGTAGCGATGCGTA |
| TACGCGCTTGTACGCGCTTG | /5Phos/CAGATACGCGCTTGTACGCGCTTG | /5Phos/CGAACAAGCGCGTACAAGCGCGTA |
| TAGACTTCACTAGACTTCAC | /5Phos/CAGATAGACTTCACTAGACTTCAC | /5Phos/CGAAGTGAAGTCTAGTGAAGTCTA |
| TATCGCTTAGTATCGCTTAG | /5Phos/CAGATATCGCTTAGTATCGCTTAG | /5Phos/CGAACTAAGCGATACTAAGCGATA |
| TCACGATCCGTCACGATCCG | /5Phos/CAGATCACGATCCGTCACGATCCG | /5Phos/CGAACGGATCGTGACGGATCGTGA |
| TCAGCTTCGCTCAGCTTCGC | /5Phos/CAGATCAGCTTCGCTCAGCTTCGC | /5Phos/CGAAGCGAAGCTGAGCGAAGCTGA |
| TCCGGACTTCTCCGGACTTC | /5Phos/CAGATCCGGACTTCTCCGGACTTC | /5Phos/CGAAGAAGTCCGGAGAAGTCCGGA |
| TCCGGTATGGTCCGGTATGG | /5Phos/CAGATCCGGTATGGTCCGGTATGG | /5Phos/CGAACCATACCGGACCATACCGGA |
| TCCGTGGTGATCCGTGGTGA | /5Phos/CAGATCCGTGGTGATCCGTGGTGA | /5Phos/CGAATCACCACGGATCACCACGGA |
| TCCTCATCCATCCTCATCCA | /5Phos/CAGATCCTCATCCATCCTCATCCA | /5Phos/CGAATGGATGAGGATGGATGAGGA |
| TCCTTCTGGATCCTTCTGGA | /5Phos/CAGATCCTTCTGGATCCTTCTGGA | /5Phos/CGAATCCAGAAGGATCCAGAAGGA |
| TCGCTGTTGCTCGCTGTTGC | /5Phos/CAGATCGCTGTTGCTCGCTGTTGC | /5Phos/CGAAGCAACAGCGAGCAACAGCGA |
| TCGGAGCTTGTCGGAGCTTG | /5Phos/CAGATCGGAGCTTGTCGGAGCTTG | /5Phos/CGAACAAGCTCCGACAAGCTCCGA |
| TCGGCATGAGTCGGCATGAG | /5Phos/CAGATCGGCATGAGTCGGCATGAG | /5Phos/CGAACTCATGCCGACTCATGCCGA |
| TCGGTGGAACTCGGTGGAAC | /5Phos/CAGATCGGTGGAACTCGGTGGAAC | /5Phos/CGAAGTTCCACCGAGTTCCACCGA |
| TCGGTTGTAATCGGTTGTAA | /5Phos/CAGATCGGTTGTAATCGGTTGTAA | /5Phos/CGAATTACAACCGATTACAACCGA |
| TCGTGTGGCATCGTGTGGCA | /5Phos/CAGATCGTGTGGCATCGTGTGGCA | /5Phos/CGAATGCCACACGATGCCACACGA |
| TCTGTTCCGCTCTGTTCCGC | /5Phos/CAGATCTGTTCCGCTCTGTTCCGC | /5Phos/CGAAGCGGAACAGAGCGGAACAGA |
| TCTTGGCGTCTCTTGGCGTC | /5Phos/CAGATCTTGGCGTCTCTTGGCGTC | /5Phos/CGAAGACGCCAAGAGACGCCAAGA |
| TGATTGAGTCTGATTGAGTC | /5Phos/CAGATGATTGAGTCTGATTGAGTC | /5Phos/CGAAGACTCAATCAGACTCAATCA |
| TGCGTTGGCATGCGTTGGCA | /5Phos/CAGATGCGTTGGCATGCGTTGGCA | /5Phos/CGAATGCCAACGCATGCCAACGCA |
| TGGACATGCGTGGACATGCG | /5Phos/CAGATGGACATGCGTGGACATGCG | /5Phos/CGAACGCATGTCCACGCATGTCCA |
| TGGCAAGCCATGGCAAGCCA | /5Phos/CAGATGGCAAGCCATGGCAAGCCA | /5Phos/CGAATGGCTTGCCATGGCTTGCCA |
| TGGTTAACTGTGGTTAACTG | /5Phos/CAGATGGTTAACTGTGGTTAACTG | /5Phos/CGAACAGTTAACCACAGTTAACCA |
| TGTACCTGAGTGTACCTGAG | /5Phos/CAGATGTACCTGAGTGTACCTGAG | /5Phos/CGAACTCAGGTACACTCAGGTACA |
| TGTACCTGAGTGTACCTGAG | /5Phos/CAGATGTACCTGAGTGTACCTGAG | /5Phos/CGAACTCAGGTACACTCAGGTACA |
| TGTACTACAGTGTACTACAG | /5Phos/CAGATGTACTACAGTGTACTACAG | /5Phos/CGAACTGTAGTACACTGTAGTACA |
| TGTCGGTTGCTGTCGGTTGC | /5Phos/CAGATGTCGGTTGCTGTCGGTTGC | /5Phos/CGAAGCAACCGACAGCAACCGACA |
| TGTCTGTCGGTGTCTGTCGG | /5Phos/CAGATGTCTGTCGGTGTCTGTCGG | /5Phos/CGAACCGACAGACACCGACAGACA |
| TGTGACTATCTGTGACTATC | /5Phos/CAGATGTGACTATCTGTGACTATC | /5Phos/CGAAGATAGTCACAGATAGTCACA |
| TGTGAGTGCGTGTGAGTGCG | /5Phos/CAGATGTGAGTGCGTGTGAGTGCG | /5Phos/CGAACGCACTCACACGCACTCACA |
| TGTGGTTCGCTGTGGTTCGC | /5Phos/CAGATGTGGTTCGCTGTGGTTCGC | /5Phos/CGAAGCGAACCACAGCGAACCACA |
| TGTTCTCTACTGTTCTCTAC | /5Phos/CAGATGTTCTCTACTGTTCTCTAC | /5Phos/CGAAGTAGAGAACAGTAGAGAACA |
| TTAGCCAGTCTTAGCCAGTC | /5Phos/CAGATTAGCCAGTCTTAGCCAGTC | /5Phos/CGAAGACTGGCTAAGACTGGCTAA |
| TTCGCGAATATTCGCGAATA | /5Phos/CAGATTCGCGAATATTCGCGAATA | /5Phos/CGAATATTCGCGAATATTCGCGAA |
| TTCGCGGTACTTCGCGGTAC | /5Phos/CAGATTCGCGGTACTTCGCGGTAC | /5Phos/CGAAGTACCGCGAAGTACCGCGAA |
| TTCTATGCAGTTCTATGCAG | /5Phos/CAGATTCTATGCAGTTCTATGCAG | /5Phos/CGAACTGCATAGAACTGCATAGAA |
| TTCTTACCGATTCTTACCGA | /5Phos/CAGATTCTTACCGATTCTTACCGA | /5Phos/CGAATCGGTAAGAATCGGTAAGAA |
| TTGCTCTGGATTGCTCTGGA | /5Phos/CAGATTGCTCTGGATTGCTCTGGA | /5Phos/CGAATCCAGAGCAATCCAGAGCAA |
| TTGTAACACCTTGTAACACC | /5Phos/CAGATTGTAACACCTTGTAACACC | /5Phos/CGAAGGTGTTACAAGGTGTTACAA |
| AACAAGTTCCAACAAGTTCC | /5Phos/CAGAAACAAGTTCCAACAAGTTCC | /5Phos/CGAAGGAACTTGTTGGAACTTGTT |
| AACAGCACGCAACAGCACGC | /5Phos/CAGAAACAGCACGCAACAGCACGC | /5Phos/CGAAGCGTGCTGTTGCGTGCTGTT |
| AACGTGCGGTAACGTGCGGT | /5Phos/CAGAAACGTGCGGTAACGTGCGGT | /5Phos/CGAAACCGCACGTTACCGCACGTT |
| AAGAGCGATGAAGAGCGATG | /5Phos/CAGAAAGAGCGATGAAGAGCGATG | /5Phos/CGAACATCGCTCTTCATCGCTCTT |
| AAGGAATTCCAAGGAATTCC | /5Phos/CAGAAAGGAATTCCAAGGAATTCC | /5Phos/CGAAGGAATTCCTTGGAATTCCTT |
| AAGTGAGGCGAAGTGAGGCG | /5Phos/CAGAAAGTGAGGCGAAGTGAGGCG | /5Phos/CGAACGCCTCACTTCGCCTCACTT |
| AATACGCGATAATACGCGAT | /5Phos/CAGAAATACGCGATAATACGCGAT | /5Phos/CGAAATCGCGTATTATCGCGTATT |
| AATAGGTTGGAATAGGTTGG | /5Phos/CAGAAATAGGTTGGAATAGGTTGG | /5Phos/CGAACCAACCTATTCCAACCTATT |
| AATCGAAGCTAATCGAAGCT | /5Phos/CAGAAATCGAAGCTAATCGAAGCT | /5Phos/CGAAAGCTTCGATTAGCTTCGATT |
| ACACTACGATACACTACGAT | /5Phos/CAGAACACTACGATACACTACGAT | /5Phos/CGAAATCGTAGTGTATCGTAGTGT |
| ACACTCAGCCACACTCAGCC | /5Phos/CAGAACACTCAGCCACACTCAGCC | /5Phos/CGAAGGCTGAGTGTGGCTGAGTGT |
| ACATCGAGCCACATCGAGCC | /5Phos/CAGAACATCGAGCCACATCGAGCC | /5Phos/CGAAGGCTCGATGTGGCTCGATGT |
| ACATTATGCGACATTATGCG | /5Phos/CAGAACATTATGCGACATTATGCG | /5Phos/CGAACGCATAATGTCGCATAATGT |
| ACCAGCAACTACCAGCAACT | /5Phos/CAGAACCAGCAACTACCAGCAACT | /5Phos/CGAAAGTTGCTGGTAGTTGCTGGT |
| ACCGAACACGACCGAACACG | /5Phos/CAGAACCGAACACGACCGAACACG | /5Phos/CGAACGTGTTCGGTCGTGTTCGGT |
| ACCGAACGGTACCGAACGGT | /5Phos/CAGAACCGAACGGTACCGAACGGT | /5Phos/CGAAACCGTTCGGTACCGTTCGGT |
| ACGAGTGGCTACGAGTGGCT | /5Phos/CAGAACGAGTGGCTACGAGTGGCT | /5Phos/CGAAAGCCACTCGTAGCCACTCGT |
| ACGGTTACGGACGGTTACGG | /5Phos/CAGAACGGTTACGGACGGTTACGG | /5Phos/CGAACCGTAACCGTCCGTAACCGT |
| ACGTAAGCGCACGTAAGCGC | /5Phos/CAGAACGTAAGCGCACGTAAGCGC | /5Phos/CGAAGCGCTTACGTGCGCTTACGT |
| ACTATGTGCTACTATGTGCT | /5Phos/CAGAACTATGTGCTACTATGTGCT | /5Phos/CGAAAGCACATAGTAGCACATAGT |
| ACTGGAGTCCACTGGAGTCC | /5Phos/CAGAACTGGAGTCCACTGGAGTCC | /5Phos/CGAAGGACTCCAGTGGACTCCAGT |
| ACTGTACTTCACTGTACTTC | /5Phos/CAGAACTGTACTTCACTGTACTTC | /5Phos/CGAAGAAGTACAGTGAAGTACAGT |
| AGAAGTCTGCAGAAGTCTGC | /5Phos/CAGAAGAAGTCTGCAGAAGTCTGC | /5Phos/CGAAGCAGACTTCTGCAGACTTCT |
| AGACGCGAGTAGACGCGAGT | /5Phos/CAGAAGACGCGAGTAGACGCGAGT | /5Phos/CGAAACTCGCGTCTACTCGCGTCT |
| AGACTGTGCTAGACTGTGCT | /5Phos/CAGAAGACTGTGCTAGACTGTGCT | /5Phos/CGAAAGCACAGTCTAGCACAGTCT |
| AGAGTACGCCAGAGTACGCC | /5Phos/CAGAAGAGTACGCCAGAGTACGCC | /5Phos/CGAAGGCGTACTCTGGCGTACTCT |
| AGATCGACTGAGATCGACTG | /5Phos/CAGAAGATCGACTGAGATCGACTG | /5Phos/CGAACAGTCGATCTCAGTCGATCT |
| AGATTCGGCCAGATTCGGCC | /5Phos/CAGAAGATTCGGCCAGATTCGGCC | /5Phos/CGAAGGCCGAATCTGGCCGAATCT |
| AGCAAGTGCTAGCAAGTGCT | /5Phos/CAGAAGCAAGTGCTAGCAAGTGCT | /5Phos/CGAAAGCACTTGCTAGCACTTGCT |
| AGCCATTGCGAGCCATTGCG | /5Phos/CAGAAGCCATTGCGAGCCATTGCG | /5Phos/CGAACGCAATGGCTCGCAATGGCT |
| AGCGGACAGTAGCGGACAGT | /5Phos/CAGAAGCGGACAGTAGCGGACAGT | /5Phos/CGAAACTGTCCGCTACTGTCCGCT |
| AGCGTAAGCGAGCGTAAGCG | /5Phos/CAGAAGCGTAAGCGAGCGTAAGCG | /5Phos/CGAACGCTTACGCTCGCTTACGCT |
| AGCTATTCTCAGCTATTCTC | /5Phos/CAGAAGCTATTCTCAGCTATTCTC | /5Phos/CGAAGAGAATAGCTGAGAATAGCT |
| AGCTTATACGAGCTTATACG | /5Phos/CAGAAGCTTATACGAGCTTATACG | /5Phos/CGAACGTATAAGCTCGTATAAGCT |
| AGGACAGATGAGGACAGATG | /5Phos/CAGAAGGACAGATGAGGACAGATG | /5Phos/CGAACATCTGTCCTCATCTGTCCT |
| AGGATCAGATAGGATCAGAT | /5Phos/CAGAAGGATCAGATAGGATCAGAT | /5Phos/CGAAATCTGATCCTATCTGATCCT |
| AGGCTGAAGGAGGCTGAAGG | /5Phos/CAGAAGGCTGAAGGAGGCTGAAGG | /5Phos/CGAACCTTCAGCCTCCTTCAGCCT |
| AGGTACGAGGAGGTACGAGG | /5Phos/CAGAAGGTACGAGGAGGTACGAGG | /5Phos/CGAACCTCGTACCTCCTCGTACCT |
| AGGTAGGCTCAGGTAGGCTC | /5Phos/CAGAAGGTAGGCTCAGGTAGGCTC | /5Phos/CGAAGAGCCTACCTGAGCCTACCT |
| AGGTGAACGGAGGTGAACGG | /5Phos/CAGAAGGTGAACGGAGGTGAACGG | /5Phos/CGAACCGTTCACCTCCGTTCACCT |
| AGGTGCCAATAGGTGCCAAT | /5Phos/CAGAAGGTGCCAATAGGTGCCAAT | /5Phos/CGAAATTGGCACCTATTGGCACCT |
| AGGTTCAACGAGGTTCAACG | /5Phos/CAGAAGGTTCAACGAGGTTCAACG | /5Phos/CGAACGTTGAACCTCGTTGAACCT |
| AGTCACTCGCAGTCACTCGC | /5Phos/CAGAAGTCACTCGCAGTCACTCGC | /5Phos/CGAAGCGAGTGACTGCGAGTGACT |
| AGTCGTGGTGAGTCGTGGTG | /5Phos/CAGAAGTCGTGGTGAGTCGTGGTG | /5Phos/CGAACACCACGACTCACCACGACT |
| AGTGGAGGAGAGTGGAGGAG | /5Phos/CAGAAGTGGAGGAGAGTGGAGGAG | /5Phos/CGAACTCCTCCACTCTCCTCCACT |
| AGTTGAGCGCAGTTGAGCGC | /5Phos/CAGAAGTTGAGCGCAGTTGAGCGC | /5Phos/CGAAGCGCTCAACTGCGCTCAACT |
| AGTTGATGGTAGTTGATGGT | /5Phos/CAGAAGTTGATGGTAGTTGATGGT | /5Phos/CGAAACCATCAACTACCATCAACT |
| ATAACACAGCATAACACAGC | /5Phos/CAGAATAACACAGCATAACACAGC | /5Phos/CGAAGCTGTGTTATGCTGTGTTAT |
| ATAAGGTCCGATAAGGTCCG | /5Phos/CAGAATAAGGTCCGATAAGGTCCG | /5Phos/CGAACGGACCTTATCGGACCTTAT |
| ATACAGTCAGATACAGTCAG | /5Phos/CAGAATACAGTCAGATACAGTCAG | /5Phos/CGAACTGACTGTATCTGACTGTAT |
| ATACCGGCCTATACCGGCCT | /5Phos/CAGAATACCGGCCTATACCGGCCT | /5Phos/CGAAAGGCCGGTATAGGCCGGTAT |
| ATAGCAGGATATAGCAGGAT | /5Phos/CAGAATAGCAGGATATAGCAGGAT | /5Phos/CGAAATCCTGCTATATCCTGCTAT |
| ATAGCGTTACATAGCGTTAC | /5Phos/CAGAATAGCGTTACATAGCGTTAC | /5Phos/CGAAGTAACGCTATGTAACGCTAT |
| ATAGTCCAACATAGTCCAAC | /5Phos/CAGAATAGTCCAACATAGTCCAAC | /5Phos/CGAAGTTGGACTATGTTGGACTAT |
| ATATCGGCGGATATCGGCGG | /5Phos/CAGAATATCGGCGGATATCGGCGG | /5Phos/CGAACCGCCGATATCCGCCGATAT |
| ATCCGTGATGATCCGTGATG | /5Phos/CAGAATCCGTGATGATCCGTGATG | /5Phos/CGAACATCACGGATCATCACGGAT |
| ATCGTACCGGATCGTACCGG | /5Phos/CAGAATCGTACCGGATCGTACCGG | /5Phos/CGAACCGGTACGATCCGGTACGAT |
| ATCGTTACTGATCGTTACTG | /5Phos/CAGAATCGTTACTGATCGTTACTG | /5Phos/CGAACAGTAACGATCAGTAACGAT |
| ATGAAGATGCATGAAGATGC | /5Phos/CAGAATGAAGATGCATGAAGATGC | /5Phos/CGAAGCATCTTCATGCATCTTCAT |
| ATGGCGTGGTATGGCGTGGT | /5Phos/CAGAATGGCGTGGTATGGCGTGGT | /5Phos/CGAAACCACGCCATACCACGCCAT |
| ATGTTGAGCGATGTTGAGCG | /5Phos/CAGAATGTTGAGCGATGTTGAGCG | /5Phos/CGAACGCTCAACATCGCTCAACAT |
| ATTAGCTGTCATTAGCTGTC | /5Phos/CAGAATTAGCTGTCATTAGCTGTC | /5Phos/CGAAGACAGCTAATGACAGCTAAT |
| ATTCGCGTGCATTCGCGTGC | /5Phos/CAGAATTCGCGTGCATTCGCGTGC | /5Phos/CGAAGCACGCGAATGCACGCGAAT |
| ATTGCGCTCCATTGCGCTCC | /5Phos/CAGAATTGCGCTCCATTGCGCTCC | /5Phos/CGAAGGAGCGCAATGGAGCGCAAT |
| ATTGTGTTGCATTGTGTTGC | /5Phos/CAGAATTGTGTTGCATTGTGTTGC | /5Phos/CGAAGCAACACAATGCAACACAAT |
| CAAGACGAATCAAGACGAAT | /5Phos/CAGACAAGACGAATCAAGACGAAT | /5Phos/CGAAATTCGTCTTGATTCGTCTTG |
| CACGCACTGTCACGCACTGT | /5Phos/CAGACACGCACTGTCACGCACTGT | /5Phos/CGAAACAGTGCGTGACAGTGCGTG |
| CACGGAGTAGCACGGAGTAG | /5Phos/CAGACACGGAGTAGCACGGAGTAG | /5Phos/CGAACTACTCCGTGCTACTCCGTG |
| CACGGTATCGCACGGTATCG | /5Phos/CAGACACGGTATCGCACGGTATCG | /5Phos/CGAACGATACCGTGCGATACCGTG |
| CACTCGGATTCACTCGGATT | /5Phos/CAGACACTCGGATTCACTCGGATT | /5Phos/CGAAAATCCGAGTGAATCCGAGTG |
| CACTTGAGTACACTTGAGTA | /5Phos/CAGACACTTGAGTACACTTGAGTA | /5Phos/CGAATACTCAAGTGTACTCAAGTG |
| CAGCCTCAGTCAGCCTCAGT | /5Phos/CAGACAGCCTCAGTCAGCCTCAGT | /5Phos/CGAAACTGAGGCTGACTGAGGCTG |
| CAGCTCCAAGCAGCTCCAAG | /5Phos/CAGACAGCTCCAAGCAGCTCCAAG | /5Phos/CGAACTTGGAGCTGCTTGGAGCTG |
| CATCGAGGAGCATCGAGGAG | /5Phos/CAGACATCGAGGAGCATCGAGGAG | /5Phos/CGAACTCCTCGATGCTCCTCGATG |
| CATTGGCCGTCATTGGCCGT | /5Phos/CAGACATTGGCCGTCATTGGCCGT | /5Phos/CGAAACGGCCAATGACGGCCAATG |
| CCAGAACTGGCCAGAACTGG | /5Phos/CAGACCAGAACTGGCCAGAACTGG | /5Phos/CGAACCAGTTCTGGCCAGTTCTGG |
| CCAGATACGGCCAGATACGG | /5Phos/CAGACCAGATACGGCCAGATACGG | /5Phos/CGAACCGTATCTGGCCGTATCTGG |
| CCAGGATCCACCAGGATCCA | /5Phos/CAGACCAGGATCCACCAGGATCCA | /5Phos/CGAATGGATCCTGGTGGATCCTGG |
| CCAGGATGTTCCAGGATGTT | /5Phos/CAGACCAGGATGTTCCAGGATGTT | /5Phos/CGAAAACATCCTGGAACATCCTGG |
| CCGAGCATGTCCGAGCATGT | /5Phos/CAGACCGAGCATGTCCGAGCATGT | /5Phos/CGAAACATGCTCGGACATGCTCGG |
| CCGGAGTGTTCCGGAGTGTT | /5Phos/CAGACCGGAGTGTTCCGGAGTGTT | /5Phos/CGAAAACACTCCGGAACACTCCGG |
| CCGGTACCATCCGGTACCAT | /5Phos/CAGACCGGTACCATCCGGTACCAT | /5Phos/CGAAATGGTACCGGATGGTACCGG |
| CCGTCTAAGGCCGTCTAAGG | /5Phos/CAGACCGTCTAAGGCCGTCTAAGG | /5Phos/CGAACCTTAGACGGCCTTAGACGG |
| CCTCCATTAACCTCCATTAA | /5Phos/CAGACCTCCATTAACCTCCATTAA | /5Phos/CGAATTAATGGAGGTTAATGGAGG |
| CCTCCTGACTCCTCCTGACT | /5Phos/CAGACCTCCTGACTCCTCCTGACT | /5Phos/CGAAAGTCAGGAGGAGTCAGGAGG |
| CCTCTGCTCTCCTCTGCTCT | /5Phos/CAGACCTCTGCTCTCCTCTGCTCT | /5Phos/CGAAAGAGCAGAGGAGAGCAGAGG |
| CCTGCCTTGTCCTGCCTTGT | /5Phos/CAGACCTGCCTTGTCCTGCCTTGT | /5Phos/CGAAACAAGGCAGGACAAGGCAGG |
| CCTGGCCATTCCTGGCCATT | /5Phos/CAGACCTGGCCATTCCTGGCCATT | /5Phos/CGAAAATGGCCAGGAATGGCCAGG |
| CCTTAACGCGCCTTAACGCG | /5Phos/CAGACCTTAACGCGCCTTAACGCG | /5Phos/CGAACGCGTTAAGGCGCGTTAAGG |
| CGACCTGTCTCGACCTGTCT | /5Phos/CAGACGACCTGTCTCGACCTGTCT | /5Phos/CGAAAGACAGGTCGAGACAGGTCG |
| CGCGTTACGTCGCGTTACGT | /5Phos/CAGACGCGTTACGTCGCGTTACGT | /5Phos/CGAAACGTAACGCGACGTAACGCG |
| CGGCAGTTCACGGCAGTTCA | /5Phos/CAGACGGCAGTTCACGGCAGTTCA | /5Phos/CGAATGAACTGCCGTGAACTGCCG |
| CGGCCATTAGCGGCCATTAG | /5Phos/CAGACGGCCATTAGCGGCCATTAG | /5Phos/CGAACTAATGGCCGCTAATGGCCG |
| CGTATTGCATCGTATTGCAT | /5Phos/CAGACGTATTGCATCGTATTGCAT | /5Phos/CGAAATGCAATACGATGCAATACG |
| CTACGACCGTCTACGACCGT | /5Phos/CAGACTACGACCGTCTACGACCGT | /5Phos/CGAAACGGTCGTAGACGGTCGTAG |
| CTAGGAAGGTCTAGGAAGGT | /5Phos/CAGACTAGGAAGGTCTAGGAAGGT | /5Phos/CGAAACCTTCCTAGACCTTCCTAG |
| CTAGTCCTGTCTAGTCCTGT | /5Phos/CAGACTAGTCCTGTCTAGTCCTGT | /5Phos/CGAAACAGGACTAGACAGGACTAG |
| CTAGTGGAGGCTAGTGGAGG | /5Phos/CAGACTAGTGGAGGCTAGTGGAGG | /5Phos/CGAACCTCCACTAGCCTCCACTAG |
| CTCGCAGAGTCTCGCAGAGT | /5Phos/CAGACTCGCAGAGTCTCGCAGAGT | /5Phos/CGAAACTCTGCGAGACTCTGCGAG |
| CTCGCTTCGTCTCGCTTCGT | /5Phos/CAGACTCGCTTCGTCTCGCTTCGT | /5Phos/CGAAACGAAGCGAGACGAAGCGAG |
| CTCGTTAGCGCTCGTTAGCG | /5Phos/CAGACTCGTTAGCGCTCGTTAGCG | /5Phos/CGAACGCTAACGAGCGCTAACGAG |
| CTCTTCCAAGCTCTTCCAAG | /5Phos/CAGACTCTTCCAAGCTCTTCCAAG | /5Phos/CGAACTTGGAAGAGCTTGGAAGAG |
| CTGCTTCAATCTGCTTCAAT | /5Phos/CAGACTGCTTCAATCTGCTTCAAT | /5Phos/CGAAATTGAAGCAGATTGAAGCAG |
| CTGGTATCAACTGGTATCAA | /5Phos/CAGACTGGTATCAACTGGTATCAA | /5Phos/CGAATTGATACCAGTTGATACCAG |
| CTGTCTTCGGCTGTCTTCGG | /5Phos/CAGACTGTCTTCGGCTGTCTTCGG | /5Phos/CGAACCGAAGACAGCCGAAGACAG |
| CTTCATGACGCTTCATGACG | /5Phos/CAGACTTCATGACGCTTCATGACG | /5Phos/CGAACGTCATGAAGCGTCATGAAG |
| CTTCGGCAGTCTTCGGCAGT | /5Phos/CAGACTTCGGCAGTCTTCGGCAGT | /5Phos/CGAAACTGCCGAAGACTGCCGAAG |
| CTTGACCGGTCTTGACCGGT | /5Phos/CAGACTTGACCGGTCTTGACCGGT | /5Phos/CGAAACCGGTCAAGACCGGTCAAG |
| CTTGCCTATTCTTGCCTATT | /5Phos/CAGACTTGCCTATTCTTGCCTATT | /5Phos/CGAAAATAGGCAAGAATAGGCAAG |
| GAACTTGTGAGAACTTGTGA | /5Phos/CAGAGAACTTGTGAGAACTTGTGA | /5Phos/CGAATCACAAGTTCTCACAAGTTC |
| GAAGCATTCTGAAGCATTCT | /5Phos/CAGAGAAGCATTCTGAAGCATTCT | /5Phos/CGAAAGAATGCTTCAGAATGCTTC |
| GAATCCATTCGAATCCATTC | /5Phos/CAGAGAATCCATTCGAATCCATTC | /5Phos/CGAAGAATGGATTCGAATGGATTC |
| GACGCCTGTTGACGCCTGTT | /5Phos/CAGAGACGCCTGTTGACGCCTGTT | /5Phos/CGAAAACAGGCGTCAACAGGCGTC |
| GACGTAGGACGACGTAGGAC | /5Phos/CAGAGACGTAGGACGACGTAGGAC | /5Phos/CGAAGTCCTACGTCGTCCTACGTC |
| GACTAATGGTGACTAATGGT | /5Phos/CAGAGACTAATGGTGACTAATGGT | /5Phos/CGAAACCATTAGTCACCATTAGTC |
| GAGCCTCCTTGAGCCTCCTT | /5Phos/CAGAGAGCCTCCTTGAGCCTCCTT | /5Phos/CGAAAAGGAGGCTCAAGGAGGCTC |
| GAGCGTCTACGAGCGTCTAC | /5Phos/CAGAGAGCGTCTACGAGCGTCTAC | /5Phos/CGAAGTAGACGCTCGTAGACGCTC |
| GAGGATAGGCGAGGATAGGC | /5Phos/CAGAGAGGATAGGCGAGGATAGGC | /5Phos/CGAAGCCTATCCTCGCCTATCCTC |
| GAGTGCCATCGAGTGCCATC | /5Phos/CAGAGAGTGCCATCGAGTGCCATC | /5Phos/CGAAGATGGCACTCGATGGCACTC |
| GAGTGGATCTGAGTGGATCT | /5Phos/CAGAGAGTGGATCTGAGTGGATCT | /5Phos/CGAAAGATCCACTCAGATCCACTC |
| GAGTGGTAGCGAGTGGTAGC | /5Phos/CAGAGAGTGGTAGCGAGTGGTAGC | /5Phos/CGAAGCTACCACTCGCTACCACTC |
| GAGTTAGAGAGAGTTAGAGA | /5Phos/CAGAGAGTTAGAGAGAGTTAGAGA | /5Phos/CGAATCTCTAACTCTCTCTAACTC |
| GCACATCTGCGCACATCTGC | /5Phos/CAGAGCACATCTGCGCACATCTGC | /5Phos/CGAAGCAGATGTGCGCAGATGTGC |
| GCACCATTACGCACCATTAC | /5Phos/CAGAGCACCATTACGCACCATTAC | /5Phos/CGAAGTAATGGTGCGTAATGGTGC |
| GCAGCCTATTGCAGCCTATT | /5Phos/CAGAGCAGCCTATTGCAGCCTATT | /5Phos/CGAAAATAGGCTGCAATAGGCTGC |
| GCAGTATCAAGCAGTATCAA | /5Phos/CAGAGCAGTATCAAGCAGTATCAA | /5Phos/CGAATTGATACTGCTTGATACTGC |
| GCCGTCGTTAGCCGTCGTTA | /5Phos/CAGAGCCGTCGTTAGCCGTCGTTA | /5Phos/CGAATAACGACGGCTAACGACGGC |
| GCCTGAGCTAGCCTGAGCTA | /5Phos/CAGAGCCTGAGCTAGCCTGAGCTA | /5Phos/CGAATAGCTCAGGCTAGCTCAGGC |
| GCGCAAGCAAGCGCAAGCAA | /5Phos/CAGAGCGCAAGCAAGCGCAAGCAA | /5Phos/CGAATTGCTTGCGCTTGCTTGCGC |
| GCGTTACGACGCGTTACGAC | /5Phos/CAGAGCGTTACGACGCGTTACGAC | /5Phos/CGAAGTCGTAACGCGTCGTAACGC |
| GCGTTGGATCGCGTTGGATC | /5Phos/CAGAGCGTTGGATCGCGTTGGATC | /5Phos/CGAAGATCCAACGCGATCCAACGC |
| GCTAGTCGCAGCTAGTCGCA | /5Phos/CAGAGCTAGTCGCAGCTAGTCGCA | /5Phos/CGAATGCGACTAGCTGCGACTAGC |
| GCTCACTACCGCTCACTACC | /5Phos/CAGAGCTCACTACCGCTCACTACC | /5Phos/CGAAGGTAGTGAGCGGTAGTGAGC |
| GCTCGAATTAGCTCGAATTA | /5Phos/CAGAGCTCGAATTAGCTCGAATTA | /5Phos/CGAATAATTCGAGCTAATTCGAGC |
| GCTCGATTCCGCTCGATTCC | /5Phos/CAGAGCTCGATTCCGCTCGATTCC | /5Phos/CGAAGGAATCGAGCGGAATCGAGC |
| GCTGAGGATCGCTGAGGATC | /5Phos/CAGAGCTGAGGATCGCTGAGGATC | /5Phos/CGAAGATCCTCAGCGATCCTCAGC |
| GCTTCATTCTGCTTCATTCT | /5Phos/CAGAGCTTCATTCTGCTTCATTCT | /5Phos/CGAAAGAATGAAGCAGAATGAAGC |
| GCTTGCTATTGCTTGCTATT | /5Phos/CAGAGCTTGCTATTGCTTGCTATT | /5Phos/CGAAAATAGCAAGCAATAGCAAGC |
| GCTTGGTTGCGCTTGGTTGC | /5Phos/TTCGGCTTGGTTGCGCTTGGTTGC | /5Phos/GTCAGCAACCAAGCGCAACCAAGC |
| GGAGTGGTTCGGAGTGGTTC | /5Phos/TTCGGGAGTGGTTCGGAGTGGTTC | /5Phos/GTCAGAACCACTCCGAACCACTCC |
| GGATAATACCGGATAATACC | /5Phos/TTCGGGATAATACCGGATAATACC | /5Phos/GTCAGGTATTATCCGGTATTATCC |
| GGATCGTGGTGGATCGTGGT | /5Phos/TTCGGGATCGTGGTGGATCGTGGT | /5Phos/GTCAACCACGATCCACCACGATCC |
| GGATGATTGTGGATGATTGT | /5Phos/TTCGGGATGATTGTGGATGATTGT | /5Phos/GTCAACAATCATCCACAATCATCC |
| GGATGCGTTCGGATGCGTTC | /5Phos/TTCGGGATGCGTTCGGATGCGTTC | /5Phos/GTCAGAACGCATCCGAACGCATCC |
| GGCGAATGTCGGCGAATGTC | /5Phos/TTCGGGCGAATGTCGGCGAATGTC | /5Phos/GTCAGACATTCGCCGACATTCGCC |
| GGCGATTGGTGGCGATTGGT | /5Phos/TTCGGGCGATTGGTGGCGATTGGT | /5Phos/GTCAACCAATCGCCACCAATCGCC |
| GGCGGTATCAGGCGGTATCA | /5Phos/TTCGGGCGGTATCAGGCGGTATCA | /5Phos/GTCATGATACCGCCTGATACCGCC |
| GGCTATCCACGGCTATCCAC | /5Phos/TTCGGGCTATCCACGGCTATCCAC | /5Phos/GTCAGTGGATAGCCGTGGATAGCC |
| GGCTATTACAGGCTATTACA | /5Phos/TTCGGGCTATTACAGGCTATTACA | /5Phos/GTCATGTAATAGCCTGTAATAGCC |
| GGCTGAACTCGGCTGAACTC | /5Phos/TTCGGGCTGAACTCGGCTGAACTC | /5Phos/GTCAGAGTTCAGCCGAGTTCAGCC |
| GGTACAGTCAGGTACAGTCA | /5Phos/TTCGGGTACAGTCAGGTACAGTCA | /5Phos/GTCATGACTGTACCTGACTGTACC |
| GGTCGAACCTGGTCGAACCT | /5Phos/TTCGGGTCGAACCTGGTCGAACCT | /5Phos/GTCAAGGTTCGACCAGGTTCGACC |
| GGTCTCTCGTGGTCTCTCGT | /5Phos/TTCGGGTCTCTCGTGGTCTCTCGT | /5Phos/GTCAACGAGAGACCACGAGAGACC |
| GGTGCTTGTCGGTGCTTGTC | /5Phos/TTCGGGTGCTTGTCGGTGCTTGTC | /5Phos/GTCAGACAAGCACCGACAAGCACC |
| GGTTCCACTTGGTTCCACTT | /5Phos/TTCGGGTTCCACTTGGTTCCACTT | /5Phos/GTCAAAGTGGAACCAAGTGGAACC |
| GGTTGCATCCGGTTGCATCC | /5Phos/TTCGGGTTGCATCCGGTTGCATCC | /5Phos/GTCAGGATGCAACCGGATGCAACC |
| GGTTGGACGTGGTTGGACGT | /5Phos/TTCGGGTTGGACGTGGTTGGACGT | /5Phos/GTCAACGTCCAACCACGTCCAACC |
| GTAAGAGCAAGTAAGAGCAA | /5Phos/TTCGGTAAGAGCAAGTAAGAGCAA | /5Phos/GTCATTGCTCTTACTTGCTCTTAC |
| GTAAGGCTTAGTAAGGCTTA | /5Phos/TTCGGTAAGGCTTAGTAAGGCTTA | /5Phos/GTCATAAGCCTTACTAAGCCTTAC |
| GTAGTCCTCAGTAGTCCTCA | /5Phos/TTCGGTAGTCCTCAGTAGTCCTCA | /5Phos/GTCATGAGGACTACTGAGGACTAC |
| GTCCGGTTCTGTCCGGTTCT | /5Phos/TTCGGTCCGGTTCTGTCCGGTTCT | /5Phos/GTCAAGAACCGGACAGAACCGGAC |
| GTCCTACAGCGTCCTACAGC | /5Phos/TTCGGTCCTACAGCGTCCTACAGC | /5Phos/GTCAGCTGTAGGACGCTGTAGGAC |
| GTCGGATTAAGTCGGATTAA | /5Phos/TTCGGTCGGATTAAGTCGGATTAA | /5Phos/GTCATTAATCCGACTTAATCCGAC |
| GTGAACAGAAGTGAACAGAA | /5Phos/TTCGGTGAACAGAAGTGAACAGAA | /5Phos/GTCATTCTGTTCACTTCTGTTCAC |
| GTGCCTACACGTGCCTACAC | /5Phos/TTCGGTGCCTACACGTGCCTACAC | /5Phos/GTCAGTGTAGGCACGTGTAGGCAC |
| GTGTATCGGAGTGTATCGGA | /5Phos/TTCGGTGTATCGGAGTGTATCGGA | /5Phos/GTCATCCGATACACTCCGATACAC |
| GTGTCCATGAGTGTCCATGA | /5Phos/TTCGGTGTCCATGAGTGTCCATGA | /5Phos/GTCATCATGGACACTCATGGACAC |
| GTGTCTAATCGTGTCTAATC | /5Phos/TTCGGTGTCTAATCGTGTCTAATC | /5Phos/GTCAGATTAGACACGATTAGACAC |
| GTGTTCCTGCGTGTTCCTGC | /5Phos/TTCGGTGTTCCTGCGTGTTCCTGC | /5Phos/GTCAGCAGGAACACGCAGGAACAC |
| GTGTTCTGCTGTGTTCTGCT | /5Phos/TTCGGTGTTCTGCTGTGTTCTGCT | /5Phos/GTCAAGCAGAACACAGCAGAACAC |
| GTTAAGAGGAGTTAAGAGGA | /5Phos/TTCGGTTAAGAGGAGTTAAGAGGA | /5Phos/GTCATCCTCTTAACTCCTCTTAAC |
| GTTAATGCGTGTTAATGCGT | /5Phos/TTCGGTTAATGCGTGTTAATGCGT | /5Phos/GTCAACGCATTAACACGCATTAAC |
| GTTAGGCTGTGTTAGGCTGT | /5Phos/TTCGGTTAGGCTGTGTTAGGCTGT | /5Phos/GTCAACAGCCTAACACAGCCTAAC |
| GTTCATTGGAGTTCATTGGA | /5Phos/TTCGGTTCATTGGAGTTCATTGGA | /5Phos/GTCATCCAATGAACTCCAATGAAC |
| GTTCGGACCAGTTCGGACCA | /5Phos/TTCGGTTCGGACCAGTTCGGACCA | /5Phos/GTCATGGTCCGAACTGGTCCGAAC |
| GTTGGCCAGTGTTGGCCAGT | /5Phos/TTCGGTTGGCCAGTGTTGGCCAGT | /5Phos/GTCAACTGGCCAACACTGGCCAAC |
| GTTGGTAGTTGTTGGTAGTT | /5Phos/TTCGGTTGGTAGTTGTTGGTAGTT | /5Phos/GTCAAACTACCAACAACTACCAAC |
| TAACACGACATAACACGACA | /5Phos/TTCGTAACACGACATAACACGACA | /5Phos/GTCATGTCGTGTTATGTCGTGTTA |
| TAAGAGAGCATAAGAGAGCA | /5Phos/TTCGTAAGAGAGCATAAGAGAGCA | /5Phos/GTCATGCTCTCTTATGCTCTCTTA |
| TAAGAGGCGGTAAGAGGCGG | /5Phos/TTCGTAAGAGGCGGTAAGAGGCGG | /5Phos/GTCACCGCCTCTTACCGCCTCTTA |
| TAAGGAATGGTAAGGAATGG | /5Phos/TTCGTAAGGAATGGTAAGGAATGG | /5Phos/GTCACCATTCCTTACCATTCCTTA |
| TAATGAGCACTAATGAGCAC | /5Phos/TTCGTAATGAGCACTAATGAGCAC | /5Phos/GTCAGTGCTCATTAGTGCTCATTA |
| TACACTGGTCTACACTGGTC | /5Phos/TTCGTACACTGGTCTACACTGGTC | /5Phos/GTCAGACCAGTGTAGACCAGTGTA |
| TACAGCGCAATACAGCGCAA | /5Phos/TTCGTACAGCGCAATACAGCGCAA | /5Phos/GTCATTGCGCTGTATTGCGCTGTA |
| TACAGGTTAGTACAGGTTAG | /5Phos/TTCGTACAGGTTAGTACAGGTTAG | /5Phos/GTCACTAACCTGTACTAACCTGTA |
| TACATTACCGTACATTACCG | /5Phos/TTCGTACATTACCGTACATTACCG | /5Phos/GTCACGGTAATGTACGGTAATGTA |
| TACCAATCTCTACCAATCTC | /5Phos/TTCGTACCAATCTCTACCAATCTC | /5Phos/GTCAGAGATTGGTAGAGATTGGTA |
| TACCGGAGAGTACCGGAGAG | /5Phos/TTCGTACCGGAGAGTACCGGAGAG | /5Phos/GTCACTCTCCGGTACTCTCCGGTA |
| TACCGGCTTCTACCGGCTTC | /5Phos/TTCGTACCGGCTTCTACCGGCTTC | /5Phos/GTCAGAAGCCGGTAGAAGCCGGTA |
| TACCTACATGTACCTACATG | /5Phos/TTCGTACCTACATGTACCTACATG | /5Phos/GTCACATGTAGGTACATGTAGGTA |
| TACGATTACGTACGATTACG | /5Phos/TTCGTACGATTACGTACGATTACG | /5Phos/GTCACGTAATCGTACGTAATCGTA |
| TACGCAGAGGTACGCAGAGG | /5Phos/TTCGTACGCAGAGGTACGCAGAGG | /5Phos/GTCACCTCTGCGTACCTCTGCGTA |
| TACTCAACGATACTCAACGA | /5Phos/TTCGTACTCAACGATACTCAACGA | /5Phos/GTCATCGTTGAGTATCGTTGAGTA |
| TAGACCAACCTAGACCAACC | /5Phos/TTCGTAGACCAACCTAGACCAACC | /5Phos/GTCAGGTTGGTCTAGGTTGGTCTA |
| TAGACCTCCGTAGACCTCCG | /5Phos/TTCGTAGACCTCCGTAGACCTCCG | /5Phos/GTCACGGAGGTCTACGGAGGTCTA |
| TAGCAGTTGATAGCAGTTGA | /5Phos/TTCGTAGCAGTTGATAGCAGTTGA | /5Phos/GTCATCAACTGCTATCAACTGCTA |
| TAGCGCAAGCTAGCGCAAGC | /5Phos/TTCGTAGCGCAAGCTAGCGCAAGC | /5Phos/GTCAGCTTGCGCTAGCTTGCGCTA |
| TAGCTATACCTAGCTATACC | /5Phos/TTCGTAGCTATACCTAGCTATACC | /5Phos/GTCAGGTATAGCTAGGTATAGCTA |
| TAGCTTGCGCTAGCTTGCGC | /5Phos/TTCGTAGCTTGCGCTAGCTTGCGC | /5Phos/GTCAGCGCAAGCTAGCGCAAGCTA |
| TAGGAATCCATAGGAATCCA | /5Phos/TTCGTAGGAATCCATAGGAATCCA | /5Phos/GTCATGGATTCCTATGGATTCCTA |
| TAGGCCGTTCTAGGCCGTTC | /5Phos/TTCGTAGGCCGTTCTAGGCCGTTC | /5Phos/GTCAGAACGGCCTAGAACGGCCTA |
| TAGGTCACTATAGGTCACTA | /5Phos/TTCGTAGGTCACTATAGGTCACTA | /5Phos/GTCATAGTGACCTATAGTGACCTA |
| TAGTCGCGTCTAGTCGCGTC | /5Phos/TTCGTAGTCGCGTCTAGTCGCGTC | /5Phos/GTCAGACGCGACTAGACGCGACTA |
| TATACGGCTATATACGGCTA | /5Phos/TTCGTATACGGCTATATACGGCTA | /5Phos/GTCATAGCCGTATATAGCCGTATA |
| TATCGCGGCATATCGCGGCA | /5Phos/TTCGTATCGCGGCATATCGCGGCA | /5Phos/GTCATGCCGCGATATGCCGCGATA |
| TATGGAGCAATATGGAGCAA | /5Phos/TTCGTATGGAGCAATATGGAGCAA | /5Phos/GTCATTGCTCCATATTGCTCCATA |
| TATGGCGTGGTATGGCGTGG | /5Phos/TTCGTATGGCGTGGTATGGCGTGG | /5Phos/GTCACCACGCCATACCACGCCATA |
| TATGTTCAGGTATGTTCAGG | /5Phos/TTCGTATGTTCAGGTATGTTCAGG | /5Phos/GTCACCTGAACATACCTGAACATA |
| TATTCCTGTCTATTCCTGTC | /5Phos/TTCGTATTCCTGTCTATTCCTGTC | /5Phos/GTCAGACAGGAATAGACAGGAATA |
| TCAAGAGATCTCAAGAGATC | /5Phos/TTCGTCAAGAGATCTCAAGAGATC | /5Phos/GTCAGATCTCTTGAGATCTCTTGA |
| TCACTACCAATCACTACCAA | /5Phos/TTCGTCACTACCAATCACTACCAA | /5Phos/GTCATTGGTAGTGATTGGTAGTGA |
| TCAGTCTGCGTCAGTCTGCG | /5Phos/TTCGTCAGTCTGCGTCAGTCTGCG | /5Phos/GTCACGCAGACTGACGCAGACTGA |
| TCAGTTAAGCTCAGTTAAGC | /5Phos/TTCGTCAGTTAAGCTCAGTTAAGC | /5Phos/GTCAGCTTAACTGAGCTTAACTGA |
| TCCAGAGTGGTCCAGAGTGG | /5Phos/TTCGTCCAGAGTGGTCCAGAGTGG | /5Phos/GTCACCACTCTGGACCACTCTGGA |
| TCCAGTCGTCTCCAGTCGTC | /5Phos/TTCGTCCAGTCGTCTCCAGTCGTC | /5Phos/GTCAGACGACTGGAGACGACTGGA |
| TCCGACGTTGTCCGACGTTG | /5Phos/TTCGTCCGACGTTGTCCGACGTTG | /5Phos/GTCACAACGTCGGACAACGTCGGA |
| TCCTACCGACTCCTACCGAC | /5Phos/TTCGTCCTACCGACTCCTACCGAC | /5Phos/GTCAGTCGGTAGGAGTCGGTAGGA |
| TCCTTCCTCCTCCTTCCTCC | /5Phos/TTCGTCCTTCCTCCTCCTTCCTCC | /5Phos/GTCAGGAGGAAGGAGGAGGAAGGA |
| TCGAGAGCCATCGAGAGCCA | /5Phos/TTCGTCGAGAGCCATCGAGAGCCA | /5Phos/GTCATGGCTCTCGATGGCTCTCGA |
| TCGCACAGACTCGCACAGAC | /5Phos/TTCGTCGCACAGACTCGCACAGAC | /5Phos/GTCAGTCTGTGCGAGTCTGTGCGA |
| TCGCCGTTAGTCGCCGTTAG | /5Phos/TTCGTCGCCGTTAGTCGCCGTTAG | /5Phos/GTCACTAACGGCGACTAACGGCGA |
| TCGGCACAACTCGGCACAAC | /5Phos/TTCGTCGGCACAACTCGGCACAAC | /5Phos/GTCAGTTGTGCCGAGTTGTGCCGA |
| TCGGCAGTTGTCGGCAGTTG | /5Phos/TTCGTCGGCAGTTGTCGGCAGTTG | /5Phos/GTCACAACTGCCGACAACTGCCGA |
| TCGGTCACACTCGGTCACAC | /5Phos/TTCGTCGGTCACACTCGGTCACAC | /5Phos/GTCAGTGTGACCGAGTGTGACCGA |
| TCGTGCTAGCTCGTGCTAGC | /5Phos/TTCGTCGTGCTAGCTCGTGCTAGC | /5Phos/GTCAGCTAGCACGAGCTAGCACGA |
| TCTAGCCTAATCTAGCCTAA | /5Phos/TTCGTCTAGCCTAATCTAGCCTAA | /5Phos/GTCATTAGGCTAGATTAGGCTAGA |
| TCTCACTGCGTCTCACTGCG | /5Phos/TTCGTCTCACTGCGTCTCACTGCG | /5Phos/GTCACGCAGTGAGACGCAGTGAGA |
| TCTCCGGCAATCTCCGGCAA | /5Phos/TTCGTCTCCGGCAATCTCCGGCAA | /5Phos/GTCATTGCCGGAGATTGCCGGAGA |
| TCTCGCTCTCTCTCGCTCTC | /5Phos/TTCGTCTCGCTCTCTCTCGCTCTC | /5Phos/GTCAGAGAGCGAGAGAGAGCGAGA |
| TCTGTCGCAATCTGTCGCAA | /5Phos/TTCGTCTGTCGCAATCTGTCGCAA | /5Phos/GTCATTGCGACAGATTGCGACAGA |
| TCTTAACCTCTCTTAACCTC | /5Phos/TTCGTCTTAACCTCTCTTAACCTC | /5Phos/GTCAGAGGTTAAGAGAGGTTAAGA |
| TGACACATGATGACACATGA | /5Phos/TTCGTGACACATGATGACACATGA | /5Phos/GTCATCATGTGTCATCATGTGTCA |
| TGAGAGTGAATGAGAGTGAA | /5Phos/TTCGTGAGAGTGAATGAGAGTGAA | /5Phos/GTCATTCACTCTCATTCACTCTCA |
| TGAGTGGCTGTGAGTGGCTG | /5Phos/TTCGTGAGTGGCTGTGAGTGGCTG | /5Phos/GTCACAGCCACTCACAGCCACTCA |
| TGATTGACCATGATTGACCA | /5Phos/TTCGTGATTGACCATGATTGACCA | /5Phos/GTCATGGTCAATCATGGTCAATCA |
| TGCAGTCGCATGCAGTCGCA | /5Phos/TTCGTGCAGTCGCATGCAGTCGCA | /5Phos/GTCATGCGACTGCATGCGACTGCA |
| TGCCATGAGGTGCCATGAGG | /5Phos/TTCGTGCAATGAGGTGCCATGAGG | /5Phos/GTCACCTCATGGCACCTCATGGCA |
| TGCCTAACGCTGCCTAACGC | /5Phos/TTCGTGCCTAACGCTGCCTAACGC | /5Phos/GTCAGCGTTAGGCAGCGTTAGGCA |
| TGCCTATAACTGCCTATAAC | /5Phos/TTCGTGCCTATAACTGCCTATAAC | /5Phos/GTCAGTTATAGGCAGTTATAGGCA |
| TGCGAGAGAGTGCGAGAGAG | /5Phos/TTCGTGCGAGAGAGTGCGAGAGAG | /5Phos/GTCACTCTCTCGCACTCTCTCGCA |
| TGCGCGATCATGCGCGATCA | /5Phos/TTCGTGCGCGATCATGCGCGATCA | /5Phos/GTCATGATCGCGCATGATCGCGCA |
| TGCGGAGTGATGCGGAGTGA | /5Phos/TTCGTGCGGAGTGATGCGGAGTGA | /5Phos/GTCATCACTCCGCATCACTCCGCA |
| TGCGGATTCCTGCGGATTCC | /5Phos/TTCGTGCGGATTCCTGCGGATTCC | /5Phos/GTCAGGAATCCGCAGGAATCCGCA |
| TGCGGCTACATGCGGCTACA | /5Phos/TTCGTGCGGCTACATGCGGCTACA | /5Phos/GTCATGTAGCCGCATGTAGCCGCA |
| TGCGTAACAATGCGTAACAA | /5Phos/TTCGTGCGTAACAATGCGTAACAA | /5Phos/GTCATTGTTACGCATTGTTACGCA |
| TGCGTCCTCATGCGTCCTCA | /5Phos/TTCGTGCGTCCTCATGCGTCCTCA | /5Phos/GTCATGAGGACGCATGAGGACGCA |
| TGCGTTCAGCTGCGTTCAGC | /5Phos/TTCGTGCGTTCAGCTGCGTTCAGC | /5Phos/GTCAGCTGAACGCAGCTGAACGCA |
| TGCTTCAGCGTGCTTCAGCG | /5Phos/TTCGTGCTTCAGCGTGCTTCAGCG | /5Phos/GTCACGCTGAAGCACGCTGAAGCA |
| TGCTTGCCTCTGCTTGCCTC | /5Phos/TTCGTGCTTGCCTCTGCTTGCCTC | /5Phos/GTCAGAGGCAAGCAGAGGCAAGCA |
| TGGAACTGGCTGGAACTGGC | /5Phos/TTCGTGGAACTGGCTGGAACTGGC | /5Phos/GTCAGCCAGTTCCAGCCAGTTCCA |
| TGTATTGGAGTGTATTGGAG | /5Phos/TTCGTGTATTGGAGTGTATTGGAG | /5Phos/GTCACTCCAATACACTCCAATACA |
| TGTGGAACGGTGTGGAACGG | /5Phos/TTCGTGTGGAACGGTGTGGAACGG | /5Phos/GTCACCGTTCCACACCGTTCCACA |
| TGTGGAGTCGTGTGGAGTCG | /5Phos/TTCGTGTGGAGTCGTGTGGAGTCG | /5Phos/GTCACGACTCCACACGACTCCACA |
| TGTGTGGCCATGTGTGGCCA | /5Phos/TTCGTGTGTGGCCATGTGTGGCCA | /5Phos/GTCATGGCCACACATGGCCACACA |
| TGTTAAGAGGTGTTAAGAGG | /5Phos/TTCGTGTTAAGAGGTGTTAAGAGG | /5Phos/GTCACCTCTTAACACCTCTTAACA |
| TGTTACTCACTGTTACTCAC | /5Phos/TTCGTGTTACTCACTGTTACTCAC | /5Phos/GTCAGTGAGTAACAGTGAGTAACA |
| TGTTCGCAGCTGTTCGCAGC | /5Phos/TTCGTGTTCGCAGCTGTTCGCAGC | /5Phos/GTCAGCTGCGAACAGCTGCGAACA |
| TGTTGGCATATGTTGGCATA | /5Phos/TTCGTGTTGGCATATGTTGGCATA | /5Phos/GTCATATGCCAACATATGCCAACA |
| TTAAGTGCAGTTAAGTGCAG | /5Phos/TTCGTTAAGTGCAGTTAAGTGCAG | /5Phos/GTCACTGCACTTAACTGCACTTAA |
| TTAGAGATCCTTAGAGATCC | /5Phos/TTCGTTAGAGATCCTTAGAGATCC | /5Phos/GTCAGGATCTCTAAGGATCTCTAA |
| TTAGGTCAGATTAGGTCAGA | /5Phos/TTCGTTAGGTCAGATTAGGTCAGA | /5Phos/GTCATCTGACCTAATCTGACCTAA |
| TTATCTCCTGTTATCTCCTG | /5Phos/TTCGTTATCTCCTGTTATCTCCTG | /5Phos/GTCACAGGAGATAACAGGAGATAA |
| TTCAGTGTCGTTCAGTGTCG | /5Phos/TTCGTTCAGTGTCGTTCAGTGTCG | /5Phos/GTCACGACACTGAACGACACTGAA |
| TTCCAAGAAGTTCCAAGAAG | /5Phos/TTCGTTCCAAGAAGTTCCAAGAAG | /5Phos/GTCACTTCTTGGAACTTCTTGGAA |
| TTCCACCGCATTCCACCGCA | /5Phos/TTCGTTCCACCGCATTCCACCGCA | /5Phos/GTCATGCGGTGGAATGCGGTGGAA |
| TTCCACTATCTTCCACTATC | /5Phos/TTCGTTCCACTATCTTCCACTATC | /5Phos/GTCAGATAGTGGAAGATAGTGGAA |
| TTCCACTTGATTCCACTTGA | /5Phos/TTCGTTCCACTTGATTCCACTTGA | /5Phos/GTCATCAAGTGGAATCAAGTGGAA |
| TTCCGAGAGCTTCCGAGAGC | /5Phos/TTCGTTCCGAGAGCTTCCGAGAGC | /5Phos/GTCAGCTCTCGGAAGCTCTCGGAA |
| TTCCTGAGCCTTCCTGAGCC | /5Phos/TTCGTTCCTGAGCCTTCCTGAGCC | /5Phos/GTCAGGCTCAGGAAGGCTCAGGAA |
| TTCGAGTCGCTTCGAGTCGC | /5Phos/TTCGTTCGAGTCGCTTCGAGTCGC | /5Phos/GTCAGCGACTCGAAGCGACTCGAA |
| TTCGTGCCAGTTCGTGCCAG | /5Phos/TTCGTTCGTGCCAGTTCGTGCCAG | /5Phos/GTCACTGGCACGAACTGGCACGAA |
| TTCTACACCATTCTACACCA | /5Phos/TTCGTTCTACACCATTCTACACCA | /5Phos/GTCATGGTGTAGAATGGTGTAGAA |
| TTCTCGCTCCTTCTCGCTCC | /5Phos/TTCGTTCTCGCTCCTTCTCGCTCC | /5Phos/GTCAGGAGCGAGAAGGAGCGAGAA |
| TTCTGGCCACTTCTGGCCAC | /5Phos/TTCGTTCTGGCCACTTCTGGCCAC | /5Phos/GTCAGTGGCCAGAAGTGGCCAGAA |
| TTGAATGGTGTTGAATGGTG | /5Phos/TTCGTTGAATGGTGTTGAATGGTG | /5Phos/GTCACACCATTCAACACCATTCAA |
| TTGAGCCGACTTGAGCCGAC | /5Phos/TTCGTTGAGCCGACTTGAGCCGAC | /5Phos/GTCAGTCGGCTCAAGTCGGCTCAA |
| TTGCGCCAAGTTGCGCCAAG | /5Phos/TTCGTTGCGCCAAGTTGCGCCAAG | /5Phos/GTCACTTGGCGCAACTTGGCGCAA |
| TTGCTCTTAGTTGCTCTTAG | /5Phos/TTCGTTGCTCTTAGTTGCTCTTAG | /5Phos/GTCACTAAGAGCAACTAAGAGCAA |
| TTGGCAAGGCTTGGCAAGGC | /5Phos/TTCGTTGGCAAGGCTTGGCAAGGC | /5Phos/GTCAGCCTTGCCAAGCCTTGCCAA |
| TTGGCTCACGTTGGCTCACG | /5Phos/TTCGTTGGCTCACGTTGGCTCACG | /5Phos/GTCACGTGAGCCAACGTGAGCCAA |
| TTGGCTTCCATTGGCTTCCA | /5Phos/TTCGTTGGCTTCCATTGGCTTCCA | /5Phos/GTCATGGAAGCCAATGGAAGCCAA |
| TTGTGGATACTTGTGGATAC | /5Phos/TTCGTTGTGGATACTTGTGGATAC | /5Phos/GTCAGTATCCACAAGTATCCACAA |
| AACACGGATGAACACGGATG | /5Phos/TTCGAACACGGATGAACACGGATG | /5Phos/GTCACATCCGTGTTCATCCGTGTT |
| AACAGACCGGAACAGACCGG | /5Phos/TTCGAACAGACCGGAACAGACCGG | /5Phos/GTCACCGGTCTGTTCCGGTCTGTT |
| AACAGTGATCAACAGTGATC | /5Phos/TTCGAACAGTGATCAACAGTGATC | /5Phos/GTCAGATCACTGTTGATCACTGTT |
| AACCATCTTGAACCATCTTG | /5Phos/TTCGAACCATCTTGAACCATCTTG | /5Phos/GTCACAAGATGGTTCAAGATGGTT |
| AACGGTGACGAACGGTGACG | /5Phos/TTCGAACGGTGACGAACGGTGACG | /5Phos/GTCACGTCACCGTTCGTCACCGTT |
| AACTACGCGGAACTACGCGG | /5Phos/TTCGAACTACGCGGAACTACGCGG | /5Phos/GTCACCGCGTAGTTCCGCGTAGTT |
| AACTAGGCTTAACTAGGCTT | /5Phos/TTCGAACTAGGCTTAACTAGGCTT | /5Phos/GTCAAAGCCTAGTTAAGCCTAGTT |
| AACTGGCGTGAACTGGCGTG | /5Phos/TTCGAACTGGCGTGAACTGGCGTG | /5Phos/GTCACACGCCAGTTCACGCCAGTT |
| AAGACAGGATAAGACAGGAT | /5Phos/TTCGAAGACAGGATAAGACAGGAT | /5Phos/GTCAATCCTGTCTTATCCTGTCTT |
| AAGAGCCAGTAAGAGCCAGT | /5Phos/TTCGAAGAGCCAGTAAGAGCCAGT | /5Phos/GTCAACTGGCTCTTACTGGCTCTT |
| AAGAGTATCGAAGAGTATCG | /5Phos/TTCGAAGAGTATCGAAGAGTATCG | /5Phos/GTCACGATACTCTTCGATACTCTT |
| AAGGAACACTAAGGAACACT | /5Phos/TTCGAAGGAACACTAAGGAACACT | /5Phos/GTCAAGTGTTCCTTAGTGTTCCTT |
| AAGTCGCAGGAAGTCGCAGG | /5Phos/TTCGAAGTCGCAGGAAGTCGCAGG | /5Phos/GTCACCTGCGACTTCCTGCGACTT |
| AATCACAGTCAATCACAGTC | /5Phos/TTCGAATCACAGTCAATCACAGTC | /5Phos/GTCAGACTGTGATTGACTGTGATT |
| AATCGCCATTAATCGCCATT | /5Phos/TTCGAATCGCCATTAATCGCCATT | /5Phos/GTCAAATGGCGATTAATGGCGATT |
| AATTGCGGCCAATTGCGGCC | /5Phos/TTCGAATTGCGGCCAATTGCGGCC | /5Phos/GTCAGGCCGCAATTGGCCGCAATT |
| ACAACTCGCGACAACTCGCG | /5Phos/TTCGACAACTCGCGACAACTCGCG | /5Phos/GTCACGCGAGTTGTCGCGAGTTGT |
| ACAAGCTGCGACAAGCTGCG | /5Phos/TTCGACAAGCTGCGACAAGCTGCG | /5Phos/GTCACGCAGCTTGTCGCAGCTTGT |
| ACACCAATTCACACCAATTC | /5Phos/TTCGACACCAATTCACACCAATTC | /5Phos/GTCAGAATTGGTGTGAATTGGTGT |
| ACAGAATGGTACACGAAGGT | /5Phos/TTCGACACGAAGGTACACGAAGGT | /5Phos/GTCAACCTTCGTGTACCTTCGTGT |
| ACAGAATGTGACAGAATGTG | /5Phos/TTCGACAGAATGTGACAGAATGTG | /5Phos/GTCACACATTCTGTCACATTCTGT |
| ACATAGTGGTACATAGTGGT | /5Phos/TTCGACATAGTGGTACATAGTGGT | /5Phos/GTCAACCACTATGTACCACTATGT |
| ACCACCACGTACCACCACGT | /5Phos/TTCGACCACCACGTACCACCACGT | /5Phos/GTCAACGTGGTGGTACGTGGTGGT |
| ACCGACAGCTACCGACAGCT | /5Phos/TTCGACCGACAGCTACCGACAGCT | /5Phos/GTCAAGCTGTCGGTAGCTGTCGGT |
| ACCGGCTAGTACCGGCTAGT | /5Phos/TTCGACCGGCTAGTACCGGCTAGT | /5Phos/GTCAACTAGCCGGTACTAGCCGGT |
| ACCGTAGATTACCGTAGATT | /5Phos/TTCGACCGTAGATTACCGTAGATT | /5Phos/GTCAAATCTACGGTAATCTACGGT |
| ACCGTGACTTACCGTGACTT | /5Phos/TTCGACCGTGACTTACCGTGACTT | /5Phos/GTCAAAGTCACGGTAAGTCACGGT |
| ACCTCACAACACCTCACAAC | /5Phos/TTCGACCTCACAACACCTCACAAC | /5Phos/GTCAGTTGTGAGGTGTTGTGAGGT |
| ACCTTGTCCTACCTTGTCCT | /5Phos/TTCGACCTTGTCCTACCTTGTCCT | /5Phos/GTCAAGGACAAGGTAGGACAAGGT |
| ACGAAGCAGGACGAAGCAGG | /5Phos/TTCGACGAAGCAGGACGAAGCAGG | /5Phos/GTCACCTGCTTCGTCCTGCTTCGT |
| ACGACTGGACACGACTGGAC | /5Phos/TTCGACGACTGGACACGACTGGAC | /5Phos/GTCAGTCCAGTCGTGTCCAGTCGT |
| ACGAGAGCAGACGAGAGCAG | /5Phos/TTCGACGAGAGCAGACGAGAGCAG | /5Phos/GTCACTGCTCTCGTCTGCTCTCGT |
| ACGCCTGTTGACGCCTGTTG | /5Phos/TTCGACGCCTGTTGACGCCTGTTG | /5Phos/GTCACAACAGGCGTCAACAGGCGT |
| ACGCGACTTCACGCGACTTC | /5Phos/TTCGACGCGACTTCACGCGACTTC | /5Phos/GTCAGAAGTCGCGTGAAGTCGCGT |
| ACGGATTGATACGGATTGAT | /5Phos/TTCGACGGATTGATACGGATTGAT | /5Phos/GTCAATCAATCCGTATCAATCCGT |
| ACGGCTCATGACGGCTCATG | /5Phos/TTCGACGGCTCATGACGGCTCATG | /5Phos/GTCACATGAGCCGTCATGAGCCGT |
| ACGGTAAGATACGGTAAGAT | /5Phos/TTCGACGGTAAGATACGGTAAGAT | /5Phos/GTCAATCTTACCGTATCTTACCGT |
| ACGGTAGCACACGGTAGCAC | /5Phos/TTCGACGGTAGCACACGGTAGCAC | /5Phos/GTCAGTGCTACCGTGTGCTACCGT |
| ACGGTGTTCGACGGTGTTCG | /5Phos/TTCGACGGTGTTCGACGGTGTTCG | /5Phos/GTCACGAACACCGTCGAACACCGT |
| ACGTCGATGGACGTCGATGG | /5Phos/TTCGACGTCGATGGACGTCGATGG | /5Phos/GTCACCATCGACGTCCATCGACGT |
| ACGTGCAGACACGTGCAGAC | /5Phos/TTCGACGTGCAGACACGTGCAGAC | /5Phos/GTCAGTCTGCACGTGTCTGCACGT |
| ACGTTCCAGCACGTTCCAGC | /5Phos/TTCGACGTTCCAGCACGTTCCAGC | /5Phos/GTCAGCTGGAACGTGCTGGAACGT |
| ACTAGCTTGTACTAGCTTGT | /5Phos/TTCGACTAGCTTGTACTAGCTTGT | /5Phos/GTCAACAAGCTAGTACAAGCTAGT |
| ACTAGGACGCACTAGGACGC | /5Phos/TTCGACTAGGACGCACTAGGACGC | /5Phos/GTCAGCGTCCTAGTGCGTCCTAGT |
| ACTCACCTGGACTCACCTGG | /5Phos/TTCGACTCACCTGGACTCACCTGG | /5Phos/GTCACCAGGTGAGTCCAGGTGAGT |
| ACTCATATCGACTCATATCG | /5Phos/TTCGACTCATATCGACTCATATCG | /5Phos/GTCACGATATGAGTCGATATGAGT |
| ACTGACCGTGACTGACCGTG | /5Phos/TTCGACTGACCGTGACTGACCGTG | /5Phos/GTCACACGGTCAGTCACGGTCAGT |
| ACTTCTAACCACTTCTAACC | /5Phos/TTCGACTTCTAACCACTTCTAACC | /5Phos/GTCAGGTTAGAAGTGGTTAGAAGT |
| ACTTGGCGCTACTTGGCGCT | /5Phos/TGACACTTGGCGCTACTTGGCGCT | /5Phos/GGGAAGCGCCAAGTAGCGCCAAGT |
| AGAACGCTCCAGAACGCTCC | /5Phos/TGACAGAACGCTCCAGAACGCTCC | /5Phos/GGGAGGAGCGTTCTGGAGCGTTCT |
| AGAACTTAGGAGAACTTAGG | /5Phos/TGACAGAACTTAGGAGAACTTAGG | /5Phos/GGGACCTAAGTTCTCCTAAGTTCT |
| AGAAGCGCATAGAAGCGCAT | /5Phos/TGACAGAAGCGCATAGAAGCGCAT | /5Phos/GGGAATGCGCTTCTATGCGCTTCT |
| AGACAATAGCAGACAATAGC | /5Phos/TGACAGACAATAGCAGACAATAGC | /5Phos/GGGAGCTATTGTCTGCTATTGTCT |
| AGACCGAGACAGACCGAGAC | /5Phos/TGACAGACCGAGACAGACCGAGAC | /5Phos/GGGAGTCTCGGTCTGTCTCGGTCT |
| AGACGCTGTCAGACGCTGTC | /5Phos/TGACAGACGCTGTCAGACGCTGTC | /5Phos/GGGAGACAGCGTCTGACAGCGTCT |
| AGACGTAGCGAGACGTAGCG | /5Phos/TGACAGACGTAGCGAGACGTAGCG | /5Phos/GGGACGCTACGTCTCGCTACGTCT |
| AGAGAGCTCTAGAGAGCTCT | /5Phos/TGACAGAGAGCTCTAGAGAGCTCT | /5Phos/GGGAAGAGCTCTCTAGAGCTCTCT |
| AGAGGCCACTAGAGGCCACT | /5Phos/TGACAGAGGCCACTAGAGGCCACT | /5Phos/GGGAAGTGGCCTCTAGTGGCCTCT |
| AGATTGCCGCAGATTGCCGC | /5Phos/TGACAGATTGCCGCAGATTGCCGC | /5Phos/GGGAGCGGCAATCTGCGGCAATCT |
| AGCACGATGCAGCACGATGC | /5Phos/TGACAGCACGATGCAGCACGATGC | /5Phos/GGGAGCATCGTGCTGCATCGTGCT |
| AGCAGAGAATAGCAGAGAAT | /5Phos/TGACAGCAGAGAATAGCAGAGAAT | /5Phos/GGGAATTCTCTGCTATTCTCTGCT |
| AGCCACAAGGAGCCACAAGG | /5Phos/TGACAGCCACAAGGAGCCACAAGG | /5Phos/GGGACCTTGTGGCTCCTTGTGGCT |
| AGCCAGGAAGAGCCAGGAAG | /5Phos/TGACAGCCAGGAAGAGCCAGGAAG | /5Phos/GGGACTTCCTGGCTCTTCCTGGCT |
| AGCTCTGGAGAGCTCTGGAG | /5Phos/TGACAGCTCTGGAGAGCTCTGGAG | /5Phos/GGGACTCCAGAGCTCTCCAGAGCT |
| AGCTTGGCAGAGCTTGGCAG | /5Phos/TGACAGCTTGGCAGAGCTTGGCAG | /5Phos/GGGACTGCCAAGCTCTGCCAAGCT |
| AGGAATAACGAGGAATAACG | /5Phos/TGACAGGAATAACGAGGAATAACG | /5Phos/GGGACGTTATTCCTCGTTATTCCT |
| AGGAATTGACAGGAATTGAC | /5Phos/TGACAGGAATTGACAGGAATTGAC | /5Phos/GGGAGTCAATTCCTGTCAATTCCT |
| AGGAGGAATTAGGAGGAATT | /5Phos/TGACAGGAGGAATTAGGAGGAATT | /5Phos/GGGAAATTCCTCCTAATTCCTCCT |
| AGGATAGGCCAGGATAGGCC | /5Phos/TGACAGGATAGGCCAGGATAGGCC | /5Phos/GGGAGGCCTATCCTGGCCTATCCT |
| AGGTGGCCTTAGGTGGCCTT | /5Phos/TGACAGGTGGCCTTAGGTGGCCTT | /5Phos/GGGAAAGGCCACCTAAGGCCACCT |
| AGGTGTTGCGAGGTGTTGCG | /5Phos/TGACAGGTGTTGCGAGGTGTTGCG | /5Phos/GGGACGCAACACCTCGCAACACCT |
| AGGTTAGGTGAGGTTAGGTG | /5Phos/TGACAGGTTAGGTGAGGTTAGGTG | /5Phos/GGGACACCTAACCTCACCTAACCT |
| AGTCCGTCCTAGTCCGTCCT | /5Phos/TGACAGTCCGTCCTAGTCCGTCCT | /5Phos/GGGAAGGACGGACTAGGACGGACT |
| AGTCGATCCGAGTCGATCCG | /5Phos/TGACAGTCGATCCGAGTCGATCCG | /5Phos/GGGACGGATCGACTCGGATCGACT |
| AGTCGCTGCTAGTCGCTGCT | /5Phos/TGACAGTCGCTGCTAGTCGCTGCT | /5Phos/GGGAAGCAGCGACTAGCAGCGACT |
| AGTCGTCCTCAGTCGTCCTC | /5Phos/TGACAGTCGTCCTCAGTCGTCCTC | /5Phos/GGGAGAGGACGACTGAGGACGACT |
| AGTGTTCCGTAGTGTTCCGT | /5Phos/TGACAGTGTTCCGTAGTGTTCCGT | /5Phos/GGGAACGGAACACTACGGAACACT |
| AGTTGCTCATAGTTGCTCAT | /5Phos/TGACAGTTGCTCATAGTTGCTCAT | /5Phos/GGGAATGAGCAACTATGAGCAACT |
| ATAACGTGAGATAACGTGAG | /5Phos/TGACATAACGTGAGATAACGTGAG | /5Phos/GGGACTCACGTTATCTCACGTTAT |
| ATACGCAGGCATACGCAGGC | /5Phos/TGACATACGCAGGCATACGCAGGC | /5Phos/GGGAGCCTGCGTATGCCTGCGTAT |
| ATACTGATGCATACTGATGC | /5Phos/TGACATACTGATGCATACTGATGC | /5Phos/GGGAGCATCAGTATGCATCAGTAT |
| ATAGTTCGTCATAGTTCGTC | /5Phos/TGACATAGTTCGTCATAGTTCGTC | /5Phos/GGGAGACGAACTATGACGAACTAT |
| ATATCTTCGCATATCTTCGC | /5Phos/TGACATATCTTCGCATATCTTCGC | /5Phos/GGGAGCGAAGATATGCGAAGATAT |
| ATATGCCTTCATATGCCTTC | /5Phos/TGACATATGCCTTCATATGCCTTC | /5Phos/GGGAGAAGGCATATGAAGGCATAT |
| ATCAGATCACATCAGATCAC | /5Phos/TGACATCAGATCACATCAGATCAC | /5Phos/GGGAGTGATCTGATGTGATCTGAT |
| ATCCAATCTGATCCAATCTG | /5Phos/TGACATCCAATCTGATCCAATCTG | /5Phos/GGGACAGATTGGATCAGATTGGAT |
| ATCCACAGCGATCCACAGCG | /5Phos/TGACATCCACAGCGATCCACAGCG | /5Phos/GGGACGCTGTGGATCGCTGTGGAT |
| ATCCGGAACGATCCGGAACG | /5Phos/TGACATCCGGAACGATCCGGAACG | /5Phos/GGGACGTTCCGGATCGTTCCGGAT |
| ATCGGCTTCCATCGGCTTCC | /5Phos/TGACATCGGCTTCCATCGGCTTCC | /5Phos/GGGAGGAAGCCGATGGAAGCCGAT |
| ATCGTCGGAGATCGTCGGAG | /5Phos/TGACATCGTCGGAGATCGTCGGAG | /5Phos/GGGACTCCGACGATCTCCGACGAT |
| ATCTCTCACGATCTCTCACG | /5Phos/TGACATCTCTCACGATCTCTCACG | /5Phos/GGGACGTGAGAGATCGTGAGAGAT |
| ATGCACCTGCATGCACCTGC | /5Phos/TGACATGCACCTGCATGCACCTGC | /5Phos/GGGAGCAGGTGCATGCAGGTGCAT |
| ATGCAGTCGCATGCAGTCGC | /5Phos/TGACATGCAGTCGCATGCAGTCGC | /5Phos/GGGAGCGACTGCATGCGACTGCAT |
| ATGCCGTAGGATGCCGTAGG | /5Phos/TGACATGCCGTAGGATGCCGTAGG | /5Phos/GGGACCTACGGCATCCTACGGCAT |
| ATGCGCGATCATGCGCGATC | /5Phos/TGACATGCGCGATCATGCGCGATC | /5Phos/GGGAGATCGCGCATGATCGCGCAT |
| ATGTGGTGATATGTGGTGAT | /5Phos/TGACATGTGGTGATATGTGGTGAT | /5Phos/GGGAATCACCACATATCACCACAT |
| ATTACGAGCCATTACGAGCC | /5Phos/TGACATTACGAGCCATTACGAGCC | /5Phos/GGGAGGCTCGTAATGGCTCGTAAT |
| ATTCCACGGCATTCCACGGC | /5Phos/TGACATTCCACGGCATTCCACGGC | /5Phos/GGGAGCCGTGGAATGCCGTGGAAT |
| ATTCGGCGTCATTCGGCGTC | /5Phos/TGACATTCGGCGTCATTCGGCGTC | /5Phos/GGGAGACGCCGAATGACGCCGAAT |
| ATTGGAAGCCATTGGAAGCC | /5Phos/TGACATTGGAAGCCATTGGAAGCC | /5Phos/GGGAGGCTTCCAATGGCTTCCAAT |
| ATTGTCGGCCATTGTCGGCC | /5Phos/TGACATTGTCGGCCATTGTCGGCC | /5Phos/GGGAGGCCGACAATGGCCGACAAT |
| CAACCGCTTGCAACCGCTTG | /5Phos/TGACCAACCGCTTGCAACCGCTTG | /5Phos/GGGACAAGCGGTTGCAAGCGGTTG |
| CAACTGGTGGCAACTGGTGG | /5Phos/TGACCAACTGGTGGCAACTGGTGG | /5Phos/GGGACCACCAGTTGCCACCAGTTG |
| CAAGATGGTGCAAGATGGTG | /5Phos/TGACCAAGATGGTGCAAGATGGTG | /5Phos/GGGACACCATCTTGCACCATCTTG |
| CAAGATTCGACAAGATTCGA | /5Phos/TGACCAAGATTCGACAAGATTCGA | /5Phos/GGGATCGAATCTTGTCGAATCTTG |
| CAAGCACGAGCAAGCACGAG | /5Phos/TGACCAAGCACGAGCAAGCACGAG | /5Phos/GGGACTCGTGCTTGCTCGTGCTTG |
| CAAGCCTGTGCAAGCCTGTG | /5Phos/TGACCAAGCCTGTGCAAGCCTGTG | /5Phos/GGGACACAGGCTTGCACAGGCTTG |
| CAAGCTCACGCAAGCTCACG | /5Phos/TGACCAAGCTCACGCAAGCTCACG | /5Phos/GGGACGTGAGCTTGCGTGAGCTTG |
| CAAGGTTGCGCAAGGTTGCG | /5Phos/TGACCAAGGTTGCGCAAGGTTGCG | /5Phos/GGGACGCAACCTTGCGCAACCTTG |
| CAAGTCGACGCAAGTCGACG | /5Phos/TGACCAAGTCGACGCAAGTCGACG | /5Phos/GGGACGTCGACTTGCGTCGACTTG |
| CACCACGAAGCACCACGAAG | /5Phos/TGACCACCACGAAGCACCACGAAG | /5Phos/GGGACTTCGTGGTGCTTCGTGGTG |
| CACCGATATTCACCGATATT | /5Phos/TGACCACCGATATTCACCGATATT | /5Phos/GGGAATATCGGTGAATATCGGTG |
| CACCGTCGAACACCGTCGAA | /5Phos/TGACCACCGTCGAACACCGTCGAA | /5Phos/GGGATTCGACGGTGTTCGACGGTG |
| CACCGTGACACACCGTGACA | /5Phos/TGACCACCGTGACACACCGTGACA | /5Phos/GGGATGTCACGGTGTGTCACGGTG |
| CACCTGCTGACACCTGCTGA | /5Phos/TGACCACCTGCTGACACCTGCTGA | /5Phos/GGGATCAGCAGGTGTCAGCAGGTG |
| CACGCACATACACGCACATA | /5Phos/TGACCACGCACATACACGCACATA | /5Phos/GGGATATGTGCGTGTATGTGCGTG |
| CACGCTAAGGCACGCTAAGG | /5Phos/TGACCACGCTAAGGCACGCTAAGG | /5Phos/GGGACCTTAGCGTGCCTTAGCGTG |
| CACGTAATCTCACGTAATCT | /5Phos/TGACCACGTAATCTCACGTAATCT | /5Phos/GGGAAGATTACGTGAGATTACGTG |
| CACGTGGAGTCACGTGGAGT | /5Phos/TGACCACGTGGAGTCACGTGGAGT | /5Phos/GGGAACTCCACGTGACTCCACGTG |
| CACTCGAGAGCACTCGAGAG | /5Phos/TGACCACTCGAGAGCACTCGAGAG | /5Phos/GGGACTCTCGAGTGCTCTCGAGTG |
| CACTCTCTGACACTCTCTGA | /5Phos/TGACCACTCTCTGACACTCTCTGA | /5Phos/GGGATCAGAGAGTGTCAGAGAGTG |
| CACTCTGGCTCACTCTGGCT | /5Phos/TGACCACTCTGGCTCACTCTGGCT | /5Phos/GGGAAGCCAGAGTGAGCCAGAGTG |
| CACTGCCATGCACTGCCATG | /5Phos/TGACCACTGCCATGCACTGCCATG | /5Phos/GGGACATGGCAGTGCATGGCAGTG |
| CACTTGAACTCACTTGAACT | /5Phos/TGACCACTTGAACTCACTTGAACT | /5Phos/GGGAAGTTCAAGTGAGTTCAAGTG |
| CAGACCTGAGCAGACCTGAG | /5Phos/TGACCAGACCTGAGCAGACCTGAG | /5Phos/GGGACTCAGGTCTGCTCAGGTCTG |
| CAGCGAGCATCAGCGAGCAT | /5Phos/TGACCAGCGAGCATCAGCGAGCAT | /5Phos/GGGAATGCTCGCTGATGCTCGCTG |
| CAGGAAGAGGCAGGAAGAGG | /5Phos/TGACCAGGAAGAGGCAGGAAGAGG | /5Phos/GGGACCTCTTCCTGCCTCTTCCTG |
| CAGTCTCATACAGTCTCATA | /5Phos/TGACCAGTCTCATACAGTCTCATA | /5Phos/GGGATATGAGACTGTATGAGACTG |
| GACTTATCGACAGTTATCGA | /5Phos/TGACCAGTTATCGACAGTTATCGA | /5Phos/GGGATCGATAACTGTCGATAACTG |
| CATACACGCGCATACACGCG | /5Phos/TGACCATACACGCGCATACACGCG | /5Phos/GGGACGCGTGTATGCGCGTGTATG |
| CATACCGACGCATACCGACG | /5Phos/TGACCATACCGACGCATACCGACG | /5Phos/GGGACGTCGGTATGCGTCGGTATG |
| CATCAATGGTCATCAATGGT | /5Phos/TGACCATCAATGGTCATCAATGGT | /5Phos/GGGAACCATTGATGACCATTGATG |
| CATGACACCGCATGACACCG | /5Phos/TGACCATGACACCGCATGACACCG | /5Phos/GGGACGGTGTCATGCGGTGTCATG |
| CATGGTTCGGCATGGTTCGG | /5Phos/TGACCATGGTTCGGCATGGTTCGG | /5Phos/GGGACCGAACCATGCCGAACCATG |
| CATTGGAGCGCATTGGAGCG | /5Phos/TGACCATTGGAGCGCATTGGAGCG | /5Phos/GGGACGCTCCAATGCGCTCCAATG |
| CCAACGAGAGCCAACGAGAG | /5Phos/TGACCCAACGAGAGCCAACGAGAG | /5Phos/GGGACTCTCGTTGGCTCTCGTTGG |
| CCAAGACCAGCCAAGACCAG | /5Phos/TGACCCAAGACCAGCCAAGACCAG | /5Phos/GGGACTGGTCTTGGCTGGTCTTGG |
| CCAATCACGGCCAATCACGG | /5Phos/TGACCCAATCACGGCCAATCACGG | /5Phos/GGGACCGTGATTGGCCGTGATTGG |
| CCACCGTTGTCCACCGTTGT | /5Phos/TGACCCACCGTTGTCCACCGTTGT | /5Phos/GGGAACAACGGTGGACAACGGTGG |
| CCAGATCGGACCAGATCGGA | /5Phos/TGACCCAGATCGGACCAGATCGGA | /5Phos/GGGATCCGATCTGGTCCGATCTGG |
| CCGAAGTCAGCCGAAGTCAG | /5Phos/TGACCCGAAGTCAGCCGAAGTCAG | /5Phos/GGGACTGACTTCGGCTGACTTCGG |
| CCGCTGAAGTCCGCTGAAGT | /5Phos/TGACCCGCTGAAGTCCGCTGAAGT | /5Phos/GGGAACTTCAGCGGACTTCAGCGG |
| CCGGACCATACCGGACCATA | /5Phos/TGACCCGGACCATACCGGACCATA | /5Phos/GGGATATGGTCCGGTATGGTCCGG |
| CCGTTCTAGGCCGTTCTAGG | /5Phos/TGACCCGTTCTAGGCCGTTCTAGG | /5Phos/GGGACCTAGAACGGCCTAGAACGG |
| CCTAATGCGGCCTAATGCGG | /5Phos/TGACCCTAATGCGGCCTAATGCGG | /5Phos/GGGACCGCATTAGGCCGCATTAGG |
| CCTATGACGACCTATGACGA | /5Phos/TGACCCTATGACGACCTATGACGA | /5Phos/GGGATCGTCATAGGTCGTCATAGG |
| CCTCACCAGTCCTCACCAGT | /5Phos/TGACCCTCACCAGTCCTCACCAGT | /5Phos/GGGAACTGGTGAGGACTGGTGAGG |
| CCTGAAGACGCCTGAAGACG | /5Phos/TGACCCTGAAGACGCCTGAAGACG | /5Phos/GGGACGTCTTCAGGCGTCTTCAGG |
| CCTGACTCCTCCTGACTCCT | /5Phos/TGACCCTGACTCCTCCTGACTCCT | /5Phos/GGGAAGGAGTCAGGAGGAGTCAGG |
| CGAAGAGTGGCGAAGAGTGG | /5Phos/TGACCGAAGAGTGGCGAAGAGTGG | /5Phos/GGGACCACTCTTCGCCACTCTTCG |
| CGAAGGTGGTCGAAGGTGGT | /5Phos/TGACCGAAGGTGGTCGAAGGTGGT | /5Phos/GGGAACCACCTTCGACCACCTTCG |
| CGACTAGCAGCGACTAGCAG | /5Phos/TGACCGACTAGCAGCGACTAGCAG | /5Phos/GGGACTGCTAGTCGCTGCTAGTCG |
| CGACTCGAGACGACTCGAGA | /5Phos/TGACCGACTCGAGACGACTCGAGA | /5Phos/GGGATCTCGAGTCGTCTCGAGTCG |
| CGACTTACAACGACTTACAA | /5Phos/TGACCGACTTACAACGACTTACAA | /5Phos/GGGATTGTAAGTCGTTGTAAGTCG |
| CGAGGATTAACGAGGATTAA | /5Phos/TGACCGAGGATTAACGAGGATTAA | /5Phos/GGGATTAATCCTCGTTAATCCTCG |
| CGAGGCATGTCGAGGCATGT | /5Phos/TGACCGAGGCATGTCGAGGCATGT | /5Phos/GGGAACATGCCTCGACATGCCTCG |
| CGAGTCTGCTCGAGTCTGCT | /5Phos/TGACCGAGTCTGCTCGAGTCTGCT | /5Phos/GGGAAGCAGACTCGAGCAGACTCG |
| CGAGTGAGCACGAGTGAGCA | /5Phos/TGACCGAGTGAGCACGAGTGAGCA | /5Phos/GGGATGCTCACTCGTGCTCACTCG |
| CGATCGGAAGCGATCGGAAG | /5Phos/TGACCGATCGGAAGCGATCGGAAG | /5Phos/GGGACTTCCGATCGCTTCCGATCG |
| CGATCTACCGCGATCTACCG | /5Phos/TGACCGATCTACCGCGATCTACCG | /5Phos/GGGACGGTAGATCGCGGTAGATCG |
| CGCCAAGCTTCGCCAAGCTT | /5Phos/TGACCGCCAAGCTTCGCCAAGCTT | /5Phos/GGGAAAGCTTGGCGAAGCTTGGCG |
| CGCCAGAATTCGCCAGAATT | /5Phos/TGACCGCCAGAATTCGCCAGAATT | /5Phos/GGGAAATTCTGGCGAATTCTGGCG |
| CGCGAATGGACGCGAATGGA | /5Phos/TGACCGCGAATGGACGCGAATGGA | /5Phos/GGGATCCATTCGCGTCCATTCGCG |
| CGCTCATCCTCGCTCATCCT | /5Phos/TGACCGCTCATCCTCGCTCATCCT | /5Phos/GGGAAGGATGAGCGAGGATGAGCG |
| CGCTCGAATGCGCTCGAATG | /5Phos/TGACCGCTCGAATGCGCTCGAATG | /5Phos/GGGACATTCGAGCGCATTCGAGCG |
| CGCTTACTATCGCTTACTAT | /5Phos/TGACCGCTTACTATCGCTTACTAT | /5Phos/GGGAATAGTAAGCGATAGTAAGCG |
| CGCTTAGCGTCGCTTAGCGT | /5Phos/TGACCGCTTAGCGTCGCTTAGCGT | /5Phos/GGGAACGCTAAGCGACGCTAAGCG |
| CGGACTTAAGCGGACTTAAG | /5Phos/TGACCGGACTTAAGCGGACTTAAG | /5Phos/GGGACTTAAGTCCGCTTAAGTCCG |
| CGGCGAACAACGGCGAACAA | /5Phos/TGACCGGCGAACAACGGCGAACAA | /5Phos/GGGATTGTTCGCCGTTGTTCGCCG |
| CGGCTTGGAACGGCTTGGAA | /5Phos/TGACCGGCTTGGAACGGCTTGGAA | /5Phos/GGGATTCCAAGCCGTTCCAAGCCG |
| CGGTAGTGCTCGGTAGTGCT | /5Phos/TGACCGGTAGTGCTCGGTAGTGCT | /5Phos/GGGAAGCACTACCGAGCACTACCG |
| CGGTTACACACGGTTACACA | /5Phos/TGACCGGTTACACACGGTTACACA | /5Phos/GGGATGTGTAACCGTGTGTAACCG |
| CGTACCGTGTCGTACCGTGT | /5Phos/TGACCGTACCGTGTCGTACCGTGT | /5Phos/GGGAACACGGTACGACACGGTACG |
| CGTAGAGCCACGTAGAGCCA | /5Phos/TGACCGTAGAGCCACGTAGAGCCA | /5Phos/GGGATGGCTCTACGTGGCTCTACG |
| CGTAGGACTGCGTAGGACTG | /5Phos/TGACCGTAGGACTGCGTAGGACTG | /5Phos/GGGACAGTCCTACGCAGTCCTACG |
| CGTATCACAACGTATCACAA | /5Phos/TGACCGTATCACAACGTATCACAA | /5Phos/GGGATTGTGATACGTTGTGATACG |
| CGTGTTGCGACGTGTTGCGA | /5Phos/TGACCGTGTTGCGACGTGTTGCGA | /5Phos/GGGATCGCAACACGTCGCAACACG |
| CGTTGGTCCACGTTGGTCCA | /5Phos/TGACCGTTGGTCCACGTTGGTCCA | /5Phos/GGGATGGACCAACGTGGACCAACG |
| CTACAGCCGACTACAGCCGA | /5Phos/TGACCTACAGCCGACTACAGCCGA | /5Phos/GGGATCGGCTGTAGTCGGCTGTAG |
| CTACGCAAGGCTACGCAAGG | /5Phos/TGACCTACGCAAGGCTACGCAAGG | /5Phos/GGGACCTTGCGTAGCCTTGCGTAG |
| CTACGGTGTGCTACGGTGTG | /5Phos/TGACCTACGGTGTGCTACGGTGTG | /5Phos/GGGACACACCGTAGCACACCGTAG |
| CTACGTTCCTCTACGTTCCT | /5Phos/TGACCTACGTTCCTCTACGTTCCT | /5Phos/GGGAAGGAACGTAGAGGAACGTAG |
| CTAGAGGCAGCTAGAGGCAG | /5Phos/TGACCTAGAGGCAGCTAGAGGCAG | /5Phos/GGGACTGCCTCTAGCTGCCTCTAG |
| CTAGGTCCAGCTAGGTCCAG | /5Phos/TGACCTAGGTCCAGCTAGGTCCAG | /5Phos/GGGACTGGACCTAGCTGGACCTAG |
| CTAGGTCGCTCTAGGTCGCT | /5Phos/TGACCTAGGTCGCTCTAGGTCGCT | /5Phos/GGGAAGCGACCTAGAGCGACCTAG |
| CTATCGCCGTCTATCGCCGT | /5Phos/TGACCTATCGCCGTCTATCGCCGT | /5Phos/GGGAACGGCGATAGACGGCGATAG |
| CTATGGATCTCTATGGATCT | /5Phos/TGACCTATGGATCTCTATGGATCT | /5Phos/GGGAAGATCCATAGAGATCCATAG |
| CTCGCGAGTTCTCGCGAGTT | /5Phos/TGACCTCGCGAGTTCTCGCGAGTT | /5Phos/GGGAAACTCGCGAGAACTCGCGAG |
| CTCGTGGCAACTCGTGGCAA | /5Phos/TGACCTCGTGGCAACTCGTGGCAA | /5Phos/GGGATTGCCACGAGTTGCCACGAG |
| CTCTACAACTCTCTACAACT | /5Phos/TGACCTCTACAACTCTCTACAACT | /5Phos/GGGAAGTTGTAGAGAGTTGTAGAG |
| CTCTATATCGCTCTATATCG | /5Phos/TGACCTCTATATCGCTCTATATCG | /5Phos/GGGACGATATAGAGCGATATAGAG |
| CTCTCCTTCACTCTCCTTCA | /5Phos/TGACCTCTCCTTCACTCTCCTTCA | /5Phos/GGGATGAAGGAGAGTGAAGGAGAG |
| CTCTCTTGCGCTCTCTTGCG | /5Phos/TGACCTCTCTTGCGCTCTCTTGCG | /5Phos/GGGACGCAAGAGAGCGCAAGAGAG |
| CTCTGCGTTGCTCTGCGTTG | /5Phos/TGACCTCTGCGTTGCTCTGCGTTG | /5Phos/GGGACAACGCAGAGCAACGCAGAG |
| CTGAATCCAGCTGAATCCAG | /5Phos/TGACCTGAATCCAGCTGAATCCAG | /5Phos/GGGACTGGATTCAGCTGGATTCAG |
| CTGAGCTTGGCTGAGCTTGG | /5Phos/TGACCTGAGCTTGGCTGAGCTTGG | /5Phos/GGGACCAAGCTCAGCCAAGCTCAG |
| CTGGATCCGACTGGATCCGA | /5Phos/TGACCTGGATCCGACTGGATCCGA | /5Phos/GGGATCGGATCCAGTCGGATCCAG |
| CTGGTCTGATCTGGTCTGAT | /5Phos/TGACCTGGTCTGATCTGGTCTGAT | /5Phos/GGGAATCAGACCAGATCAGACCAG |
| CTGTCCACAGCTGTCCACAG | /5Phos/TGACCTGTCCACAGCTGTCCACAG | /5Phos/GGGACTGTGGACAGCTGTGGACAG |
| CTGTCCTCCTCTGTCCTCCT | /5Phos/TGACCTGTCCTCCTCTGTCCTCCT | /5Phos/GGGAAGGAGGACAGAGGAGGACAG |
| CTGTCGGATGCTGTCGGATG | /5Phos/TGACCTGTCGGATGCTGTCGGATG | /5Phos/GGGACATCCGACAGCATCCGACAG |
| CTTCATCTGACTTCATCTGA | /5Phos/TGACCTTCATCTGACTTCATCTGA | /5Phos/GGGATCAGATGAAGTCAGATGAAG |
| CTTCCTGCGTCTTCCTGCGT | /5Phos/TGACCTTCCTGCGTCTTCCTGCGT | /5Phos/GGGAACGCAGGAAGACGCAGGAAG |
| CTTCGGCTAGCTTCGGCTAG | /5Phos/TGACCTTCGGCTAGCTTCGGCTAG | /5Phos/GGGACTAGCCGAAGCTAGCCGAAG |
| CTTCTTATGGCTTCTTATGG | /5Phos/TGACCTTCTTATGGCTTCTTATGG | /5Phos/GGGACCATAAGAAGCCATAAGAAG |
| CTTCTTGGATCTTCTTGGAT | /5Phos/TGACCTTCTTGGATCTTCTTGGAT | /5Phos/GGGAATCCAAGAAGATCCAAGAAG |
| CTTGCGATGGCTTGCGATGG | /5Phos/TGACCTTGCGATGGCTTGCGATGG | /5Phos/GGGACCATCGCAAGCCATCGCAAG |
| GAACCTCAGCGAACCTCAGC | /5Phos/TGACGAACGGATTAGAACGGATTA | /5Phos/GGGAGCTGAGGTTCGCTGAGGTTC |
| GAACGGATTAGAACGGATTA | /5Phos/TGACGAACGGATTAGAACGGATTA | /5Phos/GGGATAATCCGTTCTAATCCGTTC |
| GAACGTCATTGAACGTCATT | /5Phos/TGACGAACGTCATTGAACGTCATT | /5Phos/GGGAAATGACGTTCAATGACGTTC |
| GAACTGATCCGAACTGATCC | /5Phos/TGACGAACTGATCCGAACTGATCC | /5Phos/GGGAGGATCAGTTCGGATCAGTTC |
| GACAGCAGTCGACAGCAGTC | /5Phos/TGACGACAGCAGTCGACAGCAGTC | /5Phos/GGGAGACTGCTGTCGACTGCTGTC |
| GACCGAATGTGACCGAATGT | /5Phos/TGACGACCGAATGTGACCGAATGT | /5Phos/GGGAACATTCGGTCACATTCGGTC |
| GACGCCATCAGACGCCATCA | /5Phos/TGACGACGCCATCAGACGCCATCA | /5Phos/GGGATGATGGCGTCTGATGGCGTC |
| GACGCGATACGACGCGATAC | /5Phos/TGACGACGCGATACGACGCGATAC | /5Phos/GGGAGTATCGCGTCGTATCGCGTC |
| GACGCTGTGAGACGCTGTGA | /5Phos/TGACGACGCTGTGAGACGCTGTGA | /5Phos/GGGATCACAGCGTCTCACAGCGTC |
| GACGGACCTTGACGGACCTT | /5Phos/TGACGACGGACCTTGACGGACCTT | /5Phos/GGGAAAGGTCCGTCAAGGTCCGTC |
| GACGGAGTCTGACGGAGTCT | /5Phos/TGACGACGGAGTCTGACGGAGTCT | /5Phos/GGGAAGACTCCGTCAGACTCCGTC |
| GAGCACAACCGAGCACAACC | /5Phos/TGACGAGCACAACCGAGCACAACC | /5Phos/GGGAGGTTGTGCTCGGTTGTGCTC |
| GAGGAAGACCGAGGAAGACC | /5Phos/TGACGAGGAAGACCGAGGAAGACC | /5Phos/GGGAGGTCTTCCTCGGTCTTCCTC |
| GAGGCACGATGAGGCACGAT | /5Phos/TGACGAGGCACGATGAGGCACGAT | /5Phos/GGGAATCGTGCCTCATCGTGCCTC |
| GAGGTGAAGCGAGGTGAAGC | /5Phos/TGACGAGGTGAAGCGAGGTGAAGC | /5Phos/GGGAGCTTCACCTCGCTTCACCTC |
| GAGTCACACCGAGTCACACC | /5Phos/TGACGAGTCACACCGAGTCACACC | /5Phos/GGGAGGTGTGACTCGGTGTGACTC |
| GAGTCCAGACGAGTCCAGAC | /5Phos/TGACGAGTCCAGAcGAGTCCAGAC | /5Phos/GGGAGTCTGGACTCGTCTGGACTC |
| GATAACCTGTGATAACCTGT | /5Phos/TGACGATAACCTGTGATAACCTGT | /5Phos/GGGAACAGGTTATCACAGGTTATC |
| GATCCAAGGCGATCCAAGGC | /5Phos/TGACGATCCAAGGCGATCCAAGGC | /5Phos/GGGAGCCTTGGATCGCCTTGGATC |
| GATCGAGCCAGATCGAGCCA | /5Phos/TGACGATCGAGCCAGATCGAGCCA | /5Phos/GGGATGGCTCGATCTGGCTCGATC |
| GATGGCAATCGATGGCAATC | /5Phos/TGACGATGGCAATCGATGGCAATC | /5Phos/GGGAGATTGCCATCGATTGCCATC |
| GATTACCAACGATTACCAAC | /5Phos/TGACGATTACCAACGATTACCAAC | /5Phos/GGGAGTTGGTAATCGTTGGTAATC |
| GATTCGTCTTGATTCGTCTT | /5Phos/TGACGATTCGTCTTGATTCGTCTT | /5Phos/GGGAAAGACGAATCAAGACGAATC |
| GATTGTTGGAGATTGTTGGA | /5Phos/TGACGATTGTTGGAGATTGTTGGA | /5Phos/GGGATCCAACAATCTCCAACAATC |
| GCAACACGGAGCAACACGGA | /5Phos/TGACGCAACACGGAGCAACACGGA | /5Phos/GGGATCCGTGTTGCTCCGTGTTGC |
| GCAATGGTACGCAATGGTAC | /5Phos/TGACGCAATGGTACGCCATGGTAC | /5Phos/GGGAGTACCATTGCGTACCATTGC |
| GCACCACATTGCACCACATT | /5Phos/TGACGCACCACATTGCACCACATT | /5Phos/GGGAAATGTGGTGCAATGTGGTGC |
| GCAGATTGGCGCAGATTGGC | /5Phos/TGACGCAGATTGGCGCAGATTGGC | /5Phos/GGGAGCCAATCTGCGCCAATCTGC |
| GCAGGATAGCGCAGGATAGC | /5Phos/TGACGCAGGATAGCGCAGGATAGC | /5Phos/GGGAGCTATCCTGCGCTATCCTGC |
| GCATTAATCCGCATTAATCC | /5Phos/TGACGCATTAATCCGCATTAATCC | /5Phos/GGGAGGATTAATGCGGATTAATGC |
| GCCACCATCTGCCACCATCT | /5Phos/TGACGCCACCATCTGCCACCATCT | /5Phos/GGGAAGATGGTGGCAGATGGTGGC |
| GCCACCATCTGCCACCATCT | /5Phos/TGACGCCAGATACCGCCAGATACC | /5Phos/GGGAGGTATCTGGCGGTATCTGGC |
| GCCATAGATAGCCATAGATA | /5Phos/TGACGCCATAGATAGCCATAGATA | /5Phos/GGGATATCTATGGCTATCTATGGC |
| GCCATTGGACGCCATTGGAC | /5Phos/TCCCGCCATTGGACGCCATTGGAC | /5Phos/GTTGGTCCAATGGCGTCCAATGGC |
| GCCGAATCCTGCCGAATCCT | /5Phos/TCCCGCCGAATCCTGCCGAATCCT | /5Phos/GTTGAGGATTCGGCAGGATTCGGC |
| GCCGTGTCTAGCCGTGTCTA | /5Phos/TCCCGCCGTGTCTAGCCGTGTCTA | /5Phos/GTTGTAGACACGGCTAGACACGGC |
| GCCTTATCTCGCCTTATCTC | /5Phos/TCCCGCCTTATCTCGCCTTATCTC | /5Phos/GTTGGAGATAAGGCGAGATAAGGC |
| GCCTTCGCTTGCCTTCGCTT | /5Phos/TCCCGCCTTCGCTTGCCTTCGCTT | /5Phos/GTTGAAGCGAAGGCAAGCGAAGGC |
| GCGAAGTGGTGCGAAGTGGT | /5Phos/TCCCGCGAAGTGGTGCGAAGTGGT | /5Phos/GTTGACCACTTCGCACCACTTCGC |
| GCGAATATCTGCGAATATCT | /5Phos/TCCCGCGAATATCTGCGAATATCT | /5Phos/GTTGAGATATTCGCAGATATTCGC |
| GCGCTGATACGCGCTGATAC | /5Phos/TCCCGCGCTGATACGCGCTGATAC | /5Phos/GTTGGTATCAGCGCGTATCAGCGC |
| GCGGACTTCTGCGGACTTCT | /5Phos/TCCCGCGGACTTCTGCGGACTTCT | /5Phos/GTTGAGAAGTCCGCAGAAGTCCGC |
| GCGGATAAGTGCGGATAAGT | /5Phos/TCCCGCGGATAAGTGCGGATAAGT | /5Phos/GTTGACTTATCCGCACTTATCCGC |
| GCGGTCCATTGCGGTCCATT | /5Phos/TCCCGCGGTCCATTGCGGTCCATT | /5Phos/GTTGAATGGACCGCAATGGACCGC |
| GCTCAGTTAAGCTCAGTTAA | /5Phos/TCCCGCTCAGTTAAGCTCAGTTAA | /5Phos/GTTGTTAACTGAGCTTAACTGAGC |
| GCTCATTCTAGCTCATTCTA | /5Phos/TCCCGCTCATTCTAGCTCATTCTA | /5Phos/GTTGTAGAATGAGCTAGAATGAGC |
| GCTCCTAAGCGCTCCTAAGC | /5Phos/TCCCGCTCCTAAGCGCTCCTAAGC | /5Phos/GTTGGCTTAGGAGCGCTTAGGAGC |
| GCTGGAAGGAGCTGGAAGGA | /5Phos/TCCCGCTGGAAGGAGCTGGAAGGA | /5Phos/GTTGTCCTTCCAGCTCCTTCCAGC |
| GGAACAATGTGGAACAATGT | /5Phos/TCCCGGAACAATGTGGAACAATGT | /5Phos/GTTGACATTGTTCCACATTGTTCC |
| GGAACATCTCGGAACATCTC | /5Phos/TCCCGGAACATCTCGGAACATCTC | /5Phos/GTTGGAGATGTTCCGAGATGTTCC |
| GGAACCAGTAGGAACCAGTA | /5Phos/TCCCGGAACCAGTAGGAACCAGTA | /5Phos/GTTGTACTGGTTCCTACTGGTTCC |
| GGAACGACTTGGAACGACTT | /5Phos/TCCCGGAACGACTTGGAACGACTT | /5Phos/GTTGAAGTCGTTCCAAGTCGTTCC |
| GGAAGATGATGGAAGATGAT | /5Phos/TCCCGGAAGATGATGGAAGATGAT | /5Phos/GTTGATCATCTTCCATCATCTTCC |
| GGAAGGAGACGGAAGGAGAC | /5Phos/TCCCGGAAGGAGACGGAAGGAGAC | /5Phos/GTTGGTCTCCTTCCGTCTCCTTCC |
| GGAAGTGGTAGGAAGTGGTA | /5Phos/TCCCGGAAGTGGTAGGAAGTGGTA | /5Phos/GTTGTACCACTTCCTACCACTTCC |
| GGAATCAGGTGGAATCAGGT | /5Phos/TCCCGGAATCAGGTGGAATCAGGT | /5Phos/GTTGACCTGATTCCACCTGATTCC |
| GGAATGTGTAGGAATGTGTA | /5Phos/TCCCGGAATGTGTAGGAATGTGTA | /5Phos/GTTGTACACATTCCTACACATTCC |
| GGAGATAGGAGGAGATAGGA | /5Phos/TCCCGGAGATAGGAGGAGATAGGA | /5Phos/GTTGTCCTATCTCCTCCTATCTCC |
| GGAGCAATCCGGAGCAATCC | /5Phos/TCCCGGAGCAATCCGGAGCAATCC | /5Phos/GTTGGGATTGCTCCGGATTGCTCC |
| GGAGGACATCGGAGGACATC | /5Phos/TCCCGGAGGACATCGGAGGACATC | /5Phos/GTTCCATGTCCTCCGATGTCCTCC |
| GGCAATAGCCGGCAATAGCC | /5Phos/TCCCGGCAATAGCCGGCAATAGCC | /5Phos/GTTGGGCTATTGCCGGCTATTGCC |
| GGCAGAAGGAGGCAGAAGGA | /5Phos/TCCCGGCAGAAGGAGGCAGAAGGA | /5Phos/GTTGTCCTTCTGCCTCCTTCTGCC |
| GGCAGGAATAGGCAGGAATA | /5Phos/TCCCGGCAGGAATAGGCAGGAATA | /5Phos/GTTGTATTCCTGCCTATTCCTGCC |
| GGCATACACCGGCATACACC | /5Phos/TCCCGGCATACACCGGCATACACC | /5Phos/GTTGGGTGTATGCCGGTGTATGCC |
| GGCCGTTGTAGGCCGTTGTA | /5Phos/TCCCGGCCGTTGTAGGCCGTTGTA | /5Phos/GTTGTACAACGGCCTACAACGGCC |
| GGCCTGCTTAGGCCTGCTTA | /5Phos/TCCCGGCCTGCTTAGGCCTGCTTA | /5Phos/GTTGTAAGCAGGCCTAAGCAGGCC |
| GGCGAGGTAAGGCGAGGTAA | /5Phos/TCCCGGCGAGGTAAGGCGAGGTAA | /5Phos/GTTGTTACCTCGCCTTACCTCGCC |
| GGCGTGACATGGCGTGACAT | /5Phos/TCCCGGCGTGACATGGCGTGACAT | /5Phos/GTTGATGTCACGCCATGTCACGCC |
| GGCTCCAAGAGGCTCCAAGA | /5Phos/TCCCGGCTCCAAGAGGCTCCAAGA | /5Phos/GTTGTCTTGGAGCCTCTTGGAGCC |
| GGCTGCTCAAGGCTGCTCAA | /5Phos/TCCCGGCTGCTCAAGGCTGCTCAA | /5Phos/GTTGTTGAGCAGCCTTGAGCAGCC |
| GGCTGTGCTTGGCTGTGCTT | /5Phos/TCCCGGCTGTGCTTGGCTGTGCTT | /5Phos/GTTGAAGCACAGCCAAGCACAGCC |
| GGCTTCTGTCGGCTTCTGTC | /5Phos/TCCCGGCTTCTGTCGGCTTCTGTC | /5Phos/GTTGGACAGAAGCCGACAGAAGCC |
| GGTATCGCTTGGTATCGCTT | /5Phos/TCCCGGTATCGCTTGGTATCGCTT | /5Phos/GTTGAAGCGATACCAAGCGATACC |
| GGTCCTTCCAGGTCCTTCCA | /5Phos/TCCCGGTCCTTCCAGGTCCTTCCA | /5Phos/GTTGTGGAAGGACCTGGAAGGACC |
| GTTCGGTTATGGTCGGTTAT | /5Phos/TCCCGGTCGGTTATGGTCGGTTAT | /5Phos/GTTGATAACCGACCATAACCGACC |
| GGTCTGACGAGGTCTGACGA | /5Phos/TCCCGGTCTGACGAGGTCTGACGA | /5Phos/GTTGTCGTCAGACCTCGTCAGACC |
| GGTGACCACTGGTGACCACT | /5Phos/TCCCGGTGACCACTGGTGACCACT | /5Phos/GTTGAGTGGTCACCAGTGGTCACC |
| GGTGAGTCCAGGTGAGTCCA | /5Phos/TCCCGGTGAGTCCAGGTGAGTCCA | /5Phos/GTTGTGGACTCACCTGGACTCACC |
| GGTGGCGAATGGTGGCGAAT | /5Phos/TCCCGGTGGCGAATGGTGGCGAAT | /5Phos/GTTGATTCGCCACCATTCGCCACC |
| GGTGTATATCGGTGTATATC | /5Phos/TCCCGGTGTATATCGGTGTATATC | /5Phos/GTTGGATATACACCGATATACACC |
| GGTTCCTTAAGGTTCCTTAA | /5Phos/TCCCGGTTCCTTAAGGTTCCTTAA | /5Phos/GTTGTTAAGGAACCTTAAGGAACC |
| GGTTCTACAAGGTTCTACAA | /5Phos/TCCCGGTTCTACAAGGTTCTACAA | /5Phos/GTTGTTGTAGAACCTTGTAGAACC |
| GGTTGGCGTTGGTTGGCGTT | /5Phos/TCCCGGTTGGCGTTGGTTGGCGTT | /5Phos/GTTGAACGCCAACCAACGCCAACC |
| GTAACACGCTGTAACACGCT | /5Phos/TCCCGTAACACGCTGTAACACGCT | /5Phos/GTTGAGCGTGTTACAGCGTGTTAC |
| GTAGAGCGACGTAGAGCGAC | /5Phos/TCCCGTAGAGCGACGTAGAGCGAC | /5Phos/GTTGGTCGCTCTACGTCGCTCTAC |
| GTAGCTGCTCGTAGCTGCTC | /5Phos/TCCCGTAGCTGCTCGTAGCTGCTC | /5Phos/GTTGGAGCAGCTACGAGCAGCTAC |
| GTAGGTGGATGTAGGTGGAT | /5Phos/TCCCGTAGGTGGATGTAGGTGGAT | /5Phos/GTTGATCCACCTACATCCACCTAC |
| GTAGTCAGCCGTAGTCAGCC | /5Phos/TCCCGTAGTCAGCCGTAGTCAGCC | /5Phos/GTTGGGCTGACTACGGCTGACTAC |
| GTCCTTCCACGTCCTTCCAC | /5Phos/TCCCGTCCTTCCACGTCCTTCCAC | /5Phos/GTTGGTGGAAGGACGTGGAAGGAC |
| GTCGAGCAGTGTCGAGCAGT | /5Phos/TCCCGTCGAGCAGTGTCGAGCAGT | /5Phos/GTTGACTGCTCGACACTGCTCGAC |
| GTCGCACAGAGTCGCACAGA | /5Phos/TCCCGTCGCACAGAGTCGCACAGA | /5Phos/GTTGTCTGTGCGACTCTGTGCGAC |
| GTCGCACTTCGTCGCACTTC | /5Phos/TCCCGTCGCACTTCGTCGCACTTC | /5Phos/GTTGGAAGTGCGACGAAGTGCGAC |
| GTCTGGTGGTGTCTGGTGGT | /5Phos/TCCCGTCTGGTGGTGTCTGGTGGT | /5Phos/GTTGACCACCAGACACCACCAGAC |
| GTGAACTGTTGTGAACTGTT | /5Phos/TCCCGTGAACTGTTGTGAACTGTT | /5Phos/GTTGAACAGTTCACAACAGTTCAC |
| GTGCCATCCTGTGCCATCCT | /5Phos/TCCCGTGCCATCCTGTGCCATCCT | /5Phos/GTTGAGGATGGCACAGGATGGCAC |
| GTGCGTGAACGTGCGTGAAC | /5Phos/TCCCGTGCGTGAACGTGCGTGAAC | /5Phos/GTTGGTTCACGCACGTTCACGCAC |
| GTGGAGATGTGTGGAGATGT | /5Phos/TCCCGTGGAGATGTGTGGAGATGT | /5Phos/GTTGACATCTCCACACATCTCCAC |
| GTGGTGCAACGTGGTGCAAC | /5Phos/TCCCGTGGTGCAACGTGGTGCAAC | /5Phos/GTTGGTTGCACCACGTTGCACCAC |
| GTGTCGTTAAGTGTCGTTAA | /5Phos/TCCCGTGTCGTTAAGTGTCGTTAA | /5Phos/GTTGTTAACGACACTTAACGACAC |
| GTGTCTCAATGTGTCTCAAT | /5Phos/TCCCGTGTCTCAATGTGTCTCAAT | /5Phos/GTTGATTGAGACACATTGAGACAC |
| GTGTGATGACGTGTGATGAC | /5Phos/TCCCGTGTGATGACGTGTGATGAC | /5Phos/GTTGGTCATCACACGTCATCACAC |
| GTTAGATCGCGTTAGATCGC | /5Phos/TCCCGTTAGATCGCGTTAGATCGC | /5Phos/GTTGGCGATCTAACGCGATCTAAC |
| TAAGCCGATATAAGCCGATA | /5Phos/TCCCTAAGCCGATATAAGCCGATA | /5Phos/GTTGTATCGGCTTATATCGGCTTA |
| TAAGGACACCTAAGGACACC | /5Phos/TCCCTAAGGACACCTAAGGACACC | /5Phos/GTTGGGTGTCCTTAGGTGTCCTTA |
| TAAGGCCAAGTAAGGCCAAG | /5Phos/TCCCTAAGGCCAAGTAAGGCCAAG | /5Phos/GTTGCTTGGCCTTACTTGGCCTTA |
| TAATAGCGAGTAATAGCGAG | /5Phos/TCCCTAATAGCGAGTAATAGCGAG | /5Phos/GTTGCTCGCTATTACTCGCTATTA |
| TAATGGCCGGTAATGGCCGG | /5Phos/TCCCTAATGGCCGGTAATGGCCGG | /5Phos/GTTGCCGGCCATTACCGGCCATTA |
| TACCATTGGATACCATTGGA | /5Phos/TCCCTACCATTGGATACCATTGGA | /5Phos/GTTGTCCAATGGTATCCAATGGTA |
| TACGACCACCTACGACCACC | /5Phos/TCCCTACGACCACCTACGACCACC | /5Phos/GTTGGGTGGTCGTAGGTGGTCGTA |
| TACGACCTTATACGACCTTA | /5Phos/TCCCTACGACCTTATACGACCTTA | /5Phos/GTTGTAAGGTCGTATAAGGTCGTA |
| TACGTGATTCTACGTGATTC | /5Phos/TCCCTACGTGATTCTACGTGATTC | /5Phos/GTTGGAATCACGTAGAATCACGTA |
| TACTAGTCAGTACTAGTCAG | /5Phos/TCCCTACTAGTCAGTACTAGTCAG | /5Phos/GTTGCTGACTAGTACTGACTAGTA |
| TACTGACAAGTACTGACAAG | /5Phos/TCCCTACTGACAAGTACTGACAAG | /5Phos/GTTGCTTGTCAGTACTTGTCAGTA |
| TACTGCTGGCTACTGCTGGC | /5Phos/TCCCTACTGCTGGCTACTGCTGGC | /5Phos/GTTGGCCAGCAGTAGCCAGCAGTA |
| TAGACCGTAATAGACCGTAA | /5Phos/TCCCTAGACCGTAATAGACCGTAA | /5Phos/GTTGTTACGGTCTATTACGGTCTA |
| TAGACGAAGATAGACGAAGA | /5Phos/TCCCTAGACGAAGATAGACGAAGA | /5Phos/GTTGTCTTCGTCTATCTTCGTCTA |
| TAGCCTAGCCTAGCCTAGCC | /5Phos/TCCCTAGCCTAGCCTAGCCTAGCC | /5Phos/GTTGGGCTAGGCTAGGCTAGGCTA |
| TAGCGAATTCTAGCGAATTC | /5Phos/TCCCTAGCGAATTCTAGCGAATTC | /5Phos/GTTGGAATTCGCTAGAATTCGCTA |
| TAGCTGCCACTAGCTGCCAC | /5Phos/TCCCTAGCTGCCACTAGCTGCCAC | /5Phos/GTTGGTGGCAGCTAGTGGCAGCTA |
| TAGGTAGGCATAGGTAGGCA | /5Phos/TCCCTAGGTAGGCATAGGTAGGCA | /5Phos/GTTGTGCCTACCTATGCCTACCTA |
| TAGTCGTTACTAGTCGTTAC | /5Phos/TCCCTAGTCGTTACTAGTCGTTAC | /5Phos/GTTGGTAACGACTAGTAACGACTA |
| TAGTGCGAAGTAGTGCGAAG | /5Phos/TCCCTAGTGCGAAGTAGTGCGAAG | /5Phos/GTTGCTTCGCACTACTTCGCACTA |
| TAGTGGACGCTAGTGGACGC | /5Phos/TCCCTAGTGGACGCTAGTGGACGC | /5Phos/GTTGGCGTCCACTAGCGTCCACTA |
| TATAACGGTGTATAACGGTG | /5Phos/TCCCTATAACGGTGTATAACGGTG | /5Phos/GTTGCACCGTTATACACCGTTATA |
| TATAGAACCGTATAGAACCG | /5Phos/TCCCTATAGAACCGTATAGAACCG | /5Phos/GTTGCGGTTCTATACGGTTCTATA |
| TATCCGAAGGTATCCGAAGG | /5Phos/TCCCTATCCGAAGGTATCCGAAGG | /5Phos/GTTGCCTTCGGATACCTTCGGATA |
| TATCGGAGCCTATCGGAGCC | /5Phos/TCCCTATCGGAGCCTATCGGAGCC | /5Phos/GTTGGGCTCCGATAGGCTCCGATA |
| TATCGGCCTGTATCGGCCTG | /5Phos/TCCCTATCGGCCTGTATCGGCCTG | /5Phos/GTTGCAGGCCGATACAGGCCGATA |
| TATCGTCGGCTATCGTCGGC | /5Phos/TCCCTATCGTCGGCTATCGTCGGC | /5Phos/GTTGGCCGACGATAGCCGACGATA |
| TATGCGCCACTATGCGCCAC | /5Phos/TCCCTATGCGCCACTATGCGCCAC | /5Phos/GTTGGTGGCGCATAGTGGCGCATA |
| TATGGCCGTCTATGGCCGTC | /5Phos/TCCCTATGGCCGTCTATGGCCGTC | /5Phos/GTTGGACGGCCATAGACGGCCATA |
| TATTCTTCCGTATTCTTCCG | /5Phos/TCCCTATTCTTCCGTATTCTTCCG | /5Phos/GTTGCGGAAGAATACGGAAGAATA |
| TCAAGCAACGTCAAGCAACG | /5Phos/TCCCTCAAGCAACGTCAAGCAACG | /5Phos/GTTGCGTTGCTTGACGTTGCTTGA |
| TCAAGCAGTCTCAAGCAGTC | /5Phos/TCCCTCAAGCAGTCTCAAGCAGTC | /5Phos/GTTGGACTGCTTGAGACTGCTTGA |
| TCAAGTCCGATCAAGTCCGA | /5Phos/TCCCTCAAGTCCGATCAAGTCCGA | /5Phos/GTTGTCGGACTTGATCGGACTTGA |
| TCAATCGAGATCAATCGAGA | /5Phos/TCCCTCAATCGAGATCAATCGAGA | /5Phos/GTTGTCTCGATTGATCTCGATTGA |
| TCAATGTCGATCAATGTCGA | /5Phos/TCCCTCAATGTCGATCAATGTCGA | /5Phos/GTTGTCGACATTGATCGACATTGA |
| TCACTGAGGCTCACTGAGGC | /5Phos/TCCCTCACTGAGGCTCACTGAGGC | /5Phos/TCCGGCCTCAGTGAGCCTCAGTGA |
| TCAGCGAGACTCAGCGAGAC | /5Phos/TCCCTCAGCGAGACTCAGCGAGAC | /5Phos/GTTGGTCTCGCTGAGTCTCGCTGA |
| TCAGGAGGAATCAGGAGGAA | /5Phos/TCCCTCAGGAGGAATCAGGAGGAA | /5Phos/GTTGTTCCTCCTGATTCCTCCTGA |
| TCAGGCACAGTCAGGCACAG | /5Phos/TCCCTCAGGCACAGTCAGGCACAG | /5Phos/GTTGCTGTGCCTGACTGTGCCTGA |
| TCAGGCTTCCTCAGGCTTCC | /5Phos/TCCCTCAGGCTTCCTCAGGCTTCC | /5Phos/GTTGGGAAGCCTGAGGAAGCCTGA |
| TCCACACTCGTCCACACTCG | /5Phos/TCCCTCCACACTCGTCCACACTCG | /5Phos/GTTGCGAGTGTGGACGAGTGTGGA |
| TCCACAGCGATCCACAGCGA | /5Phos/TCCCTCCACAGCGATCCAGCTGCA | /5Phos/GTTGTCGCTGTGGATCGCTGTGGA |
| TCCAGCTGCATCCAGCTGCA | /5Phos/TCCCTCCAGCTGCATCCAGCTGCA | /5Phos/GTTGTGCAGCTGGATGCAGCTGGA |
| TCCATAATCCTCCATAATCC | /5Phos/TCCCTCCATAATCCTCCATAATCC | /5Phos/GTTGGGATTATGGAGGATTATGGA |
| TCCGGACCAATCCGGACCAA | /5Phos/TCCCTCCGGACCAATCCGGACCAA | /5Phos/GTTGTTGGTCCGGATTGGTCCGGA |
| TCCGTAACGGTCCGTAACGG | /5Phos/TCCCTCCGTAACGGTCCGTAACGG | /5Phos/GTTGCCGTTACGGACCGTTACGGA |
| TCCGTAGGTCTCCGTAGGTC | /5Phos/TCCCTCCGTAGGTCTCCGTAGGTC | /5Phos/GTTGGACCTACGGAGACCTACGGA |
| TCCGTCCAAGTCCGTCCAAG | /5Phos/TCCCTCCGTCCAAGTCCGTCCAAG | /5Phos/GTTGCTTGGACGGACTTGGACGGA |
| TCCTGAACCGTCCTGAACCG | /5Phos/TCCCTCCTGAACCGTCCTGAACCG | /5Phos/GTTGCGGTTCAGGACGGTTCAGGA |
| TCCTGGCATGTCCTGGCATG | /5Phos/TCCCTCCTGGCATGTCCTGGCATG | /5Phos/GTTGCATGCCAGGACATGCCAGGA |
| TCGCGCTACATCGCGCTACA | /5Phos/TCCCTCGCGCTACATCGCGCTACA | /5Phos/GTTGTGTAGCGCGATGTAGCGCGA |
| TCGGTTACCATCGGTTACCA | /5Phos/TCCCTCGGTTACCATCGGTTACCA | /5Phos/GTTGTGGTAACCGATGGTAACCGA |
| TCGTCCGTCATCGTCCGTCA | /5Phos/TCCCTCGTCCGTCATCGTCCGTCA | /5Phos/GTTGTGACGGACGATGACGGACGA |
| TCGTCCTCAGTCGTCCTCAG | /5Phos/TCCCTCGTCCTCAGTCGTCCTCAG | /5Phos/GTTGCTGAGGACGACTGAGGACGA |
| TCTACCGCTCTCTACCGCTC | /5Phos/TCCCTCTACCGCTCTCTACCGCTC | /5Phos/GTTGGAGCGGTAGAGAGCGGTAGA |
| TCTAGCTCGGTCTAGCTCGG | /5Phos/TCCCTCTAGCTCGGTCTAGCTCGG | /5Phos/GTTGCCGAGCTAGACCGAGCTAGA |
| TCTCGGCTGATCTCGGCTGA | /5Phos/TCCCTCTCGGCTGATCTCGGCTGA | /5Phos/GTTGTCAGCCGAGATCAGCCGAGA |
| TCTCGGTCAGTCTCGGTCAG | /5Phos/TCCCTCTCGGTCAGTCTCGGTCAG | /5Phos/GTTGCTGACCGAGACTGACCGAGA |
| TCTCTAGATCTCTCTAGATC | /5Phos/TCCCTCTCTAGATCTCTCTAGATC | /5Phos/GTTGGATCTAGAGAGATCTAGAGA |
| TCTGACCGCATCTGACCGCA | /5Phos/TCCCTCTGACCGCATCTGACCGCA | /5Phos/GTTGTGCGGTCAGATGCGGTCAGA |
| TCTGGACAGATCTGGACAGA | /5Phos/TCCCTCTGGACAGATCTGGACAGA | /5Phos/GTTGTCTGTCCAGATCTGTCCAGA |
| TCTGGATAAGTCTGGATAAG | /5Phos/TCCCTCTGGATAAGTCTGGATAAG | /5Phos/GTTGCTTATCCAGACTTATCCAGA |
| TCTTACGGCCTCTTACGGCC | /5Phos/TCCCTCTTACGGCCTCTTACGGCC | /5Phos/GTTGGGCCGTAAGAGGCCGTAAGA |
| TCTTGCATACTCTTGCATAC | /5Phos/TCCCTCTTGCATACTCTTGCATAC | /5Phos/GTTGGTATGCAAGAGTATGCAAGA |
| TGAACTTGGATGAACTTGGA | /5Phos/TCCCTGAACTTGGATGAACTTGGA | /5Phos/GTTGTCCAAGTTCATCCAAGTTCA |
| TGACACAGCGTGACACAGCG | /5Phos/TCCCTGACACAGCGTGACACAGCG | /5Phos/GTTGCGCTGTGTCACGCTGTGTCA |
| TGACAGGTCCTGACAGGTCC | /5Phos/TCCCTGACAGGTCCTGACAGGTCC | /5Phos/GTTGGGACCTGTCAGGACCTGTCA |
| TGACCTTCCGTGACCTTCCG | /5Phos/TCCCTGACCTTCCGTGACCTTCCG | /5Phos/GTTGCGGAAGGTCACGGAAGGTCA |
| TGACGTCGGATGACGTCGGA | /5Phos/TCCCTGACGTCGGATGACGTCGGA | /5Phos/GTTGTCCGACGTCATCCGACGTCA |
| TGACTATCTCTGACTATCTC | /5Phos/TCCCTGACTATCTCTGACTATCTC | /5Phos/GTTGGAGATAGTCAGAGATAGTCA |
| TGACTCCAGGTGACTCCAGG | /5Phos/TCCCTGACTCCAGGTGACTCCAGG | /5Phos/GTTGCCTGGAGTCACCTGGAGTCA |
| TGAGAGCAGGTGAGAGCAGG | /5Phos/TCCCTGAGAGCAGGTGAGAGCAGG | /5Phos/GTTGCCTGCTCTCACCTGCTCTCA |
| TGAGCCTCCATGAGCCTCCA | /5Phos/TCCCTGAGCCTCCATGAGCCTCCA | /5Phos/GTTGTGGAGGCTCATGGAGGCTCA |
| TGAGTATGGATGAGTATGGA | /5Phos/TCCCTGAGTATGGATGAGTATGGA | /5Phos/GTTGTCCATACTCATCCATACTCA |
| TGCAACATACTGCAACATAC | /5Phos/TCCCTGCAACATACTGCAACATAC | /5Phos/GTTGGTATGTTGCAGTATGTTGCA |
| TGCGCTGTAGTGCGCTGTAG | /5Phos/TCCCTGCGCTGTAGTGCGCTGTAG | /5Phos/GTTGCTACAGCGCACTACAGCGCA |
| TGCTAACCGGTGCTAACCGG | /5Phos/TCCCTGCTAACCGGTGCTAACCGG | /5Phos/GTTGCCGGTTAGCACCGGTTAGCA |
| TGCTCCACTGTGCTCCACTG | /5Phos/TCCCTGCTCCACTGTGCTCCACTG | /5Phos/GTTGCAGTGGAGCACAGTGGAGCA |
| TGGAAGGAGCTGGAAGGAGC | /5Phos/TCCCTGGAAGGAGCTGGAAGGAGC | /5Phos/GTTGGCTCCTTCCAGCTCCTTCCA |
| TGGCAGTGACTGGCAGTGAC | /5Phos/TCCCTGGCAGTGACTGGCAGTGAC | /5Phos/GTTGGTCACTGCCAGTCACTGCCA |
| TGGCATCAGCTGGCATCAGC | /5Phos/TCCCTGGCATCAGCTGGCATCAGC | /5Phos/GTTGGCTGATGCCAGCTGATGCCA |
| TGGCCTTATATGGCCTTATA | /5Phos/TCCCTGGCCTTATATGGCCTTATA | /5Phos/GTTGTATAAGGCCATATAAGGCCA |
| TGGCGAAGCATGGCGAAGCA | /5Phos/TCCCTGGCGAAGCATGGCGAAGCA | /5Phos/GTTGTGCTTCGCCATGCTTCGCCA |
| TGGCTTAAGATGGCTTAAGA | /5Phos/TCCCTGGCTTAAGATGGCTTAAGA | /5Phos/GTTGTCTTAAGCCATCTTAAGCCA |
| TGGTCAGCTCTGGTCAGCTC | /5Phos/TCCCTGGTCAGCTCTGGTCAGCTC | /5Phos/GTTGGAGCTGACCAGAGCTGACCA |
| TGGTTCCAACTGGTTCCAAC | /5Phos/TCCCTGGTTCCAACTGGTTCCAAC | /5Phos/GTTGGTTGGAACCAGTTGGAACCA |
| TGGTTGGTAATGGTTGGTAA | /5Phos/TCCCTGGTTGGTAATGGTTGGTAA | /5Phos/GTTGTTACCAACCATTACCAACCA |
| TGTACGCGCATGTACGCGCA | /5Phos/TCCCTGTACGCGCATGTACGCGCA | /5Phos/GTTGTGCGCGTACATGCGCGTACA |
| TGTACGCTGGTGTACGCTGG | /5Phos/TCCCTGTACGCTGGTGTACGCTGG | /5Phos/GTTGCCAGCGTACACCAGCGTACA |
| TGTAGCATTGTGTAGCATTG | /5Phos/TCCCTGTAGCATTGTGTAGCATTG | /5Phos/GTTGCAATGCTACACAATGCTACA |
| TGTAGTGCCGTGTAGTGCCG | /5Phos/TCCCTGTAGTGCCGTGTAGTGCCG | /5Phos/GTTGCGGCACTACACGGCACTACA |
| TGTGAATCTGTGTGAATCTG | /5Phos/TCCCTGTGAATCTGTGTGAATCTG | /5Phos/GTTGCAGATTCACACAGATTCACA |
| TGTTCCGTGGTGTTCCGTGG | /5Phos/TCCCTGTTCCGTGGTGTTCCGTGG | /5Phos/GTTGCCACGGAACACCACGGAACA |
| TTAGCGCGTGTTAGCGCGTG | /5Phos/TCCCTTAGCGCGTGTTAGCGCGTG | /5Phos/GTTGCACGCGCTAACACGCGCTAA |
| TTAGTTGGACTTAGTTGGAC | /5Phos/TCCCTTAGTTGGACTTAGTTGGAC | /5Phos/GTTGGTCCAACTAAGTCCAACTAA |
| TTCCAACTTCTTCCAACTTC | /5Phos/TCCCTTCCAACTTCTTCCAACTTC | /5Phos/GTTGGAAGTTGGAAGAAGTTGGAA |
| TTCGTCAGGTTCCGTCAGG | /5Phos/TCCCTTCCGTCAGGTTCCGTCAGG | /5Phos/GTTGCCTGACGGAACCTGACGGAA |
| TTCCTCACCGTTCCTCACCG | /5Phos/TCCCTTCCTCACCGTTCCTCACCG | /5Phos/GTTGCGGTGAGGAACGGTGAGGAA |
| TTCCTCCGACTTCCTCCGAC | /5Phos/TCCCTTCCTCCGACTTCCTCCGAC | /5Phos/GTTGGTCGGAGGAAGTCGGAGGAA |
| TTCGACCTGGTTCGACCTGG | /5Phos/TCCCTTCGACCTGGTTCGACCTGG | /5Phos/GTTGCCAGGTCGAACCAGGTCGAA |
| TTCGCGTGGATTCGCGTGGA | /5Phos/TCCCTTCGCGTGGATTCGCGTGGA | /5Phos/GTTGTCCACGCGAATCCACGCGAA |
| TTCGGAAGCGTTCGGAAGCG | /5Phos/TCCCTTCGGAAGCGTTCGGAAGCG | /5Phos/GTTGCGCTTCCGAACGCTTCCGAA |
| TTCTCGATTGTTCTCGATTG | /5Phos/TCCCTTCTCGATTGTTCTCGATTG | /5Phos/GTTGCAATCGAGAACAATCGAGAA |
| TTCTCTCTAGTTCTCTCTAG | /5Phos/TCCCTTCTCTCTAGTTCTCTCTAG | /5Phos/GTTGCTAGAGAGAACTAGAGAGAA |
| TTCTTGCGCGTTCTTGCGCG | /5Phos/TCCCTTCTTGCGCGTTCTTGCGCG | /5Phos/GTTGCGCGCAAGAACGCGCAAGAA |
| TTGAGGTCGGTTGAGGTCGG | /5Phos/TCCCTTGAGGTCGGTTGAGGTCGG | /5Phos/GTTGCCGACCTCAACCGACCTCAA |
| TTGCACACGCTTGCACACGC | /5Phos/TCCCTTGCACACGCTTGCACACGC | /5Phos/GTTGGCGTGTGCAAGCGTGTGCAA |
| TTGCGCTCTGTTGCGCTCTG | /5Phos/TCCCTTGCGCTCTGTTGCGCTCTG | /5Phos/GTTGCAGAGCGCAACAGAGCGCAA |
| TTGCTGCAGCTTGCTGCAGC | /5Phos/TCCCTTGCTGCAGCTTGCTGCAGC | /5Phos/GTTGGCTGCAGCAAGCTGCAGCAA |
| TTGGCGTCTGTTGGCGTCTG | /5Phos/TCCCTTGGCGTCTGTTGGCGTCTG | /5Phos/GTTGCAGACGCCAACAGACGCCAA |
| TTGGTCCTTCTTGGTCCTTC | /5Phos/TCCCTTGGTCCTTCTTGGTCCTTC | /5Phos/GTTGGAAGGACCAAGAAGGACCAA |
| TTGTCGAGAGTTGTCGAGAG | /5Phos/TCCCTTGTCGAGAGTTGTCGAGAG | /5Phos/GTTGCTCTCGACAACTCTCGACAA |
| TTGTCTGTACTTGTCTGTAC | /5Phos/TCCCTTGTCTGTACTTGTCTGTAC | /5Phos/GTTGGTACAGACAAGTACAGACAA |
| TTGTTCTCTCTTGTTCTCTC | /5Phos/TCCCTTGTTCTCTCTTGTTCTCTC | /5Phos/GTTGGAGAGAACAAGAGAGAACAA |
| AACACACGTTAACACACGTT | /5Phos/TCCCAACACACGTTAACACACGTT | /5Phos/GTTGAACGTGTGTTAACGTGTGTT |
| AACATCGAGTAACATCGAGT | /5Phos/TCCCAACATCGAGTAACATCGAGT | /5Phos/GTTGACTCGATGTTACTCGATGTT |
| AACCGAGGACAACCGAGGAC | /5Phos/TCCCAACCGAGGACAACCGAGGAC | /5Phos/GTTGGTCCTCGGTTGTCCTCGGTT |
| AACCTAGTAGAACCTAGTAG | /5Phos/TCCCAACCTAGTAGAACCTAGTAG | /5Phos/GTTGCTACTAGGTTCTACTAGGTT |
| AACGCATACTAACGCATACT | /5Phos/TCCCAACGCATACTAACGCATACT | /5Phos/GTTGAGTATGCGTTAGTATGCGTT |
| AACTAACCTCAACTAACCTC | /5Phos/TCCCAACTAACCTCAACTAACCTC | /5Phos/GTTGGAGGTTAGTTGAGGTTAGTT |
| AACTAAGGAGAACTAAGGAG | /5Phos/TCCCAACTAAGGAGAACTAAGGAG | /5Phos/GTTGCTCCTTAGTTCTCCTTAGTT |
| AACTCGTTCTAACTCGTTCT | /5Phos/TCCCAACTCGTTCTAACTCGTTCT | /5Phos/GTTGAGAACGAGTTAGAACGAGTT |
| AACTGCCGCTAACTGCCGCT | /5Phos/TCCCAACTGCCGCTAACTGCCGCT | /5Phos/GTTGAGCGGCAGTTAGCGGCAGTT |

[0113] Each unique label may comprise two or more detectable oligonucleotide tags. The two or more tags may be three or more tags, four or more tags, or five or more tags. In some embodiments, a unique label may comprise 2, 3, 4, 5, 6, 7, 8, 9, 10, 15, 20, 30, 40, 50, 100 or more detectable tags.

[0114] The tags are typically bound to each other, typically in a directional manner. Methods for sequentially attaching nucleic acids such as oligonucleotides to each other are known in the art and include, but are not limited to, ligation and polymerization, or a combination of both (see, e.g., Green and Sambrook. Molecular Cloning: A Laboratory Manual, Fourth Edition, 2012). Ligation reactions include blunt end ligation and cohesive overhang ligation. In some instances, ligation may comprise both blunt end and cohesive overhang ligation. A cohesive overhang is a single stranded end sequence (attached to a double stranded sequence) capable of binding to another single stranded sequence thereby forming a double stranded sequence. A cohesive overhang may be generated by a polymerase, a restriction endonuclease, a combination of a polymerase and a restriction endonuclease, or a Uracil-Specific Excision Reagent (USER™) enzyme (New England BioLabs Inc., Ipswich, Mass.) or a combination of a Uracil DNA glycosylase enzyme and a DNA glycosylase-lyase Exonuclease VIII enzyme. A cohesive overhang may be a thymidine tail. Polymerization reactions include enzyme-mediated polymerization such as a polymerase-mediated fill-reaction.

[0115] Methods for detecting and analyzing unique labels are known in the art. In some embodiments, detection may comprise determining the presence, number, and/or order of detectable tags that comprise a unique label. Methods of sequencing oligonucleotides and nucleic acids are well known in the art (see, e.g., WO93/23564, WO98/28440 and WO98/13523; U.S. Pat. Nos. 5,525,464; 5,202,231; 5,695,940; 4,971,903; 5,902,723; 5,795,782; 5,547,839 and 5,403,708; Sanger et al., Proc. Natl. Acad. Sci. USA 74:5463 (1977); Drmanac et al., Genomics 4:114 (1989); Koster et al., Nature Biotechnology 14:1123 (1996); Hyman, Anal. Biochem. 174:423 (1988); Rosenthal, International Patent Application Publication 761107 (1989); Metzker et al., Nucl. Acids Res. 22:4259 (1994); Jones, Biotechniques 22:938 (1997); Ronaghi et al., Anal. Biochem. 242:84 (1996); Ronaghi et al., Science 281:363 (1998); Nyren et al., Anal. Biochem. 151:504 (1985); Canard and Arzumanov, Gene 11:1 (1994); Dyatkina and Arzumanov, Nucleic Acids Symp Ser 18:117 (1987); Johnson et al., Anal. Biochem. 136:192 (1984); and Elgen and Rigler, Proc. Natl. Acad. Sci. USA 91(13):5740 (1994), all of which are expressly incorporated by reference).

### Generation of Unique Labels

[0116] In some aspects, the invention provides methods for generating unique labels. The methods typically use a plurality of detectable tags to generate unique labels. In some embodiments, a unique label is produced by sequentially attaching two or more detectable oligonucleotide tags to each other. The detectable tags may be present or provided in a plurality of detectable tags. The same or a different plurality of tags may be used as the source of each detectable tag comprised in a unique label. In other words, a plurality of tags may be subdivided into subsets and single subsets may be used as the source for each tag. This is exemplified in at least FIG. 1.

[0117] A plurality of tags may comprise 2, 3, 4, 5, 6, 7, 8, 9, 10, 10², 10³, 10⁴, 10⁵, or 10⁶, or more tags. Typically, the tags within a plurality are unique relative to each other.

[0118] The methods of the invention allow an end user to generate a unique label for a plurality of agents using a number of tags that are less (and in some instances far less) than the number of agents to be labeled. The number of tags may be up to or about 10-fold, 10²-fold, 10³-fold, or 10⁴-fold less than the number of agents. The number of agents to be labeled will depend on the particular application. The invention contemplates uniquely labeling at least 10³, 10⁴, 10⁵, 10⁶, 10⁷, 10⁸, 10⁹, or 10¹⁰ or more agents. In some embodiments, the agent may comprise a plurality of nucleic acids. In some embodiments, the plurality of nucleic acids may comprise at least 10³, 10⁴, 10⁵, 10⁶, 10⁷, 10⁸, 10⁹, or 10¹⁰ nucleic acids.

[0119] In certain methods of the invention, agents, detectable tags, and resultant unique labels are all present in a contained volume and are thus physically separate from other agents, detectable tags, and resultant unique labels. In some instances, the contained volume is on the order of picoliters, nanoliters, or microliters. The contained volume may be a droplet such as an emulsion droplet.

[0120] As discussed herein, in some instances, an agent is attached to the unique label (or label intermediate) directly or indirectly. In these instances, once the detectable tag is attached to either the agent or the label intermediate, the droplets are ruptured (or broken) and their contents are pooled (and effectively mixed together). The contents of the pool may be introduced, at limiting dilution, into another plurality of emulsion droplets each of which may comprise a single detectable oligonucleotide tag (and optionally multiple copies of the oligonucleotide tag). This results in droplets that each contain an agent or a label intermediate, together with a single detectable oligonucleotide tag, and optionally reagents and enzymes required for tag attachment. Once the tag is attached, the droplets are again ruptured, and the process is repeated until a sufficient number of unique labels is generated.

[0121] In some embodiments a subset of the plurality of agents is present in the same container during attachment of a detectable label. In some embodiments, the plurality of agents is separated such that each agent in the plurality is in a separate container, e.g., an emulsion droplet.

[0122] In some embodiments, the process of pooling and subsequently separating the plurality of agents is performed n number of times, wherein n is the number of times required to generate (m₁)(m₂)(m₃) . . . (mₙ) number of combinations of detectable oligonucleotide tags, wherein (m₁)(m₂)(m₃) . . . (mₙ) number of combinations of detectable oligonucleotide tags is greater than the number of the plurality of agents.

[0123] The invention provides a method which may comprise
[0124] (a) labeling two or more first subsets of agents with a detectable oligonucleotide tag to produce agents within a subset that are identically labeled relative to each other and uniquely labeled relative to agents in other subsets;
[0125] (b) combining two or more subsets of uniquely-labeled agents to form a pool of agents, wherein the pool may comprise two or more second subsets of agents that are distinct from the two or more first subsets of agents;
[0126] (c) identically labeling two or more second subsets of agents with a second detectable oligonucleotide tag to produce agents within a second subset that are uniquely labeled relative to agents in the same or different second subsets; and
[0127] (d) repeating steps (b) and (c) until a number of unique labels is generated that exceeds the number of starting agents, wherein each unique label may comprise at least two detectable oligonucleotide tags.

[0128] The invention provides another method which may comprise
[0129] (a) providing a pool of agents;
[0130] (b) separating the pool of agents into sub-pools of agents;
[0131] (c) labeling agents in each sub-pool of with one of m₁ unique detectable oligonucleotide tags thereby producing sub-pools of labeled agents, wherein agents in a sub-pool are identically labeled to each other;
[0132] (d) combining sub-pools of labeled agents to create a pool of labeled agents;
[0133] (e) separating the pool of labeled agents into second sub-pools of agents;
[0134] (f) repeating steps (c) to (e) n times to produce agents labeled with n unique detectable oligonucleotide tags, wherein the pool in (a) consists of a number of agents that is less than (m₁)(m₂)(m₃) . . . (mₙ).

[0135] The invention provides another method which may comprise
[0136] (a) providing a population of library droplets which may comprise agents, wherein each droplet may comprise an agent;
[0137] (b) fusing each individual library droplet with a single detectable oligonucleotide tag droplet from a plurality of m₁ detectable oligonucleotide tag droplets, each detectable oligonucleotide tag droplet which may comprise a plurality of identical detectable oligonucleotide tag;
[0138] (c) labeling the agent with the detectable oligonucleotide tag in a fused droplet;
[0139] (d) harvesting labeled agents from the fused droplets and generating another population of library droplets which may comprise labeled agents; and
[0140] (e) repeating steps (b) to (d) n times to produce agents labeled with a unique label which may comprise n detectable oligonucleotides tags, wherein the n detectable oligonucleotide tags generate an (m₁)(m₂)(m₃) . . . (mₙ) number of combinations that is greater than the number of starting agents.

[0141] The invention provides another method which may comprise
[0142] (a) providing a population of library droplets which may comprise agents, wherein each droplet may comprise more than one agent;
[0143] (b) fusing each individual library droplet with a single detectable oligonucleotide tag droplet from a plurality of m₁ detectable oligonucleotide tag droplets, each detectable oligonucleotide tag droplet which may comprise a plurality of identical detectable oligonucleotide tag;
[0144] (c) labeling the more than one agents with the detectable oligonucleotide tag in a fused droplet;
[0145] (d) harvesting labeled agents from the fused droplets and generating another population of library droplets which may comprise labeled agents, wherein each droplet may comprise more than one agent; and
[0146] (e) repeating steps (b) to (d) n times to produce agents labeled with a unique label which may comprise n detectable oligonucleotides tags, wherein the n detectable oligonucleotide tags generate an (m₁)(m₂)(m₃) . . . (mₙ) number of combinations that is greater than the number of starting agents and optionally wherein the agents within the same droplet are labeled identically.

### Emulsions

[0147] Methods for making emulsion droplets are known in the art (see, e.g., WO 2006/040551; WO 2006/040554; WO 2004/002627; WO 2004/091763; WO 2005/021151; WO 2006/096571; WO 2007/089541; WO 2007/081385 and WO 2008/063227; U.S. Pat. No. 7,708,949; U.S. Patent Publication No. 20120122714, 20110000560, 20100022414; John Leamon, Darren R Link, Michael Egholm & Jonathan M Rothberg. Overview: methods and applications for droplet compartmentalization of biology. Nature Methods. Vol. 3, No. 7, 2006; E. Brouzes, M. Medkova, N. Savenelli, D. Marran, M. Twardowski, J. B. Hutchison, J. M. Rothberg, D. R. Link, N. Perrimon, M. L. Samuels. Droplet microfluidic technology for single-cell high-throughput screening. PNAS, 106, 14195. 2009; J. C. Baret, O. J. Miller, V. Taly, M. Ryckelynck, A. El-Harrak, L. Frenz, C. Rick, M. L. Samuels, J. B. Hutchison, J. J. Agresti, D. R. Link, D. A. Weitz and A. D. Griffiths. Fluorescence-activated droplet sorting (FADS): Efficient microfluidic cell sorting based on enzymatic activity. Lab Chip, 9, 1850. 2009; M. M. Kiss, L. Ortoleva-Donnelly, N. R. Beer, J. Warner, C. G. Bailey, B. W. Colston, J. M. Rothberg, D. R. Link, and J. H. Leamon. High-throughput quantitative polymerase chain reaction in picoliter droplets. Anal Chem. 2008 Dec. 1; 80(23): 8975-8981; Edd et al. Controlled encapsulation of single-cells into monodisperse picolitre drops. Lab Chip. 8(8): 1262-1264, 2008; Anna S L, Bontoux N, Stone H A (2003) Formation of dispersions using “flow focusing” in microchannels. Appl Phys Lett 82:364-366; all of which are incorporated herein by reference in their entirety).

[0148] A “droplet” or “emulsion droplet”, as used herein, is an isolated portion of a first fluid that is completely surrounded by a second fluid. The first and second fluids are immiscible with each other. For example, the discontinuous phase can be an aqueous solution and the continuous phase can a hydrophobic fluid such as an oil or a fluorocarbon oil. This is termed a water in oil emulsion. Alternatively, the emulsion may be an oil in water emulsion. In that example, the first liquid, which is dispersed in globules, is referred to as the discontinuous phase, whereas the second liquid is referred to as the continuous phase or the dispersion medium. The continuous phase can be an aqueous solution and the discontinuous phase is a hydrophobic fluid, such as an oil (e.g., decane, tetradecane, or hexadecane). The droplets or globules of oil in an oil in water emulsion are also referred to herein as “micelles”, whereas globules of water in a water in oil emulsion may be referred to as “reverse micelles”. In some cases, the droplets may be spherical or substantially spherical; however, in other cases, the droplets may be non-spherical.

[0149] The terms “droplet library” or “droplet libraries” are also referred to herein as an “emulsion library” or “emulsion libraries.” Examples of droplet libraries are collections of droplets that have different contents, ranging from DNA, primers, etc. The droplets range in size from roughly 0.5 micron to 500 micron in diameter, which corresponds to about 1 pico liter to 1 nano liter. However, droplets can be as small as 5 microns and as large as 500 microns. Preferably, the droplets are at less than 100 microns, about 1 micron to about 100 microns in diameter. The most preferred size is about 20 to 40 microns in diameter (10 to 100 picoliters). The preferred properties examined of droplet libraries include osmotic pressure balance, uniform size, and size ranges.

[0150] Droplets can be generated by infusing aqueous samples which may comprise library elements, e.g., agents, detectable tags, or combinations thereof, at a perpendicular angle to opposing oil streams. Droplets can be contained within a microfluidic channel. Microfluidic channels and method for manufacturing microfluidic channels are known in the art (see, e.g., McDonald J C, et al. (2000) Fabrication of microfluidic systems in poly(dimethylsiloxane) Electrophoresis 21:27-40; Siegel A C, et al.

[0151] 2006) Cofabrication of electromagnets and microfluidic systems in poly(dimethylsiloxane)13. Angew Chem-Ger Edit 118:7031-7036; Agresti et al. (2009). Ultrahigh-throughput screening in drop-based microfluidics for directed evolution. PNAS 107(9), 4004-4009; all of which are incorporated herein in their entirety).

[0152] Other examples of microfluidic devices and approaches for use herein are disclosed in an application filed on Sep. 21, 2012, entitled “Systems and Methods for Droplet Tagging”, incorporated by reference herein in its entirety.

[0153] Droplets can be optionally merged. Merging can be accomplished, e.g., by passing an electrical field through a microfluidic channel to merge charged droplets, or by addition of a chemical that breaks emulsions. (See K. Ahn, J. Agresti, H. Chong, M. Marquez and D. A. Weitz, Appl. Phys. Lett., 2006, 88, 264105 and D Link, E Grasland-Mongrain, A Duri, F Sarrazin, Z Cheng, G Cristobal, M Marquez, and DA Weitz. Angew. Chem. Int. Ed. 2006, 45, 2556-2560 as examples.)

[0154] Generation of unique labels may occur in part or entirely in emulsion droplets. The unique label is generated in an emulsion droplet or in a series of emulsion droplets. A library of uniquely-labeled agents is generated using an emulsion droplet or a series of emulsion droplets.

### Mate-Pair Analysis

[0155] Another aspect of the invention addresses a fundamental issue associated with the creation of mate-pair (long distance linkage) libraries. Mate-pair libraries are useful for extracting distance information from sequences and are most typically used in genomic assemblies, detection of splicing in transcripts, and detection of genomic rearrangements. Traditionally, mate-pair libraries require that DNA molecules be circularized in order to directly join the ends together (i.e., as a mate-pair). The efficiency of circularization decreases as jump length increases, thus increasingly specialized techniques are required in order to prepare jumps of varying sizes. The methods described herein offer a major advantage over current methodologies in that mate-pair analysis is achieved without relying on circularization and is independent of jump length, thus making it a universal mate-pair protocol potentially suitable across a range of sequencing technologies.

[0156] In some embodiments, reactions are performed in emulsion droplets at single molecule dilution resulting in significant reductions in reagent costs, cycle time and input material. As described herein, emulsion droplets are used to segregate individual DNA molecules so that the ends of each DNA molecule can either be physically re-joined via ligation or informatically associated via analysis of the unique label.

[0157] Accordingly, in one aspect methods are provided for performing mate-pair analysis.

[0158] In some embodiments, the method may comprise:
[0159] (a) providing a population of library droplets which may comprise nucleic acids, wherein each droplet may comprise a nucleic acids end-labeled on its 5′ and 3′ ends with oligonucleotide label, wherein the oligonucleotide label on the 5′ end (the 5′ oligonucleotide label) and the oligonucleotide on the 3′ end (the 3′ oligonucleotide label) comprise a nucleotide cohesive overhang, and wherein the nucleotide cohesive overhang on the 5′ oligonucleotide label is complementary to the nucleotide cohesive overhang on the 3′ oligonucleotide label;
[0160] (b) fusing each individual library droplet with a droplet which may comprise a DNA fragmenting enzyme, thereby producing a fused droplet;
[0161] (c) fragmenting the nucleic acid with the 5′ and 3′ oligonucleotide labels in the fused droplet, thereby producing a fused droplet which may comprise a nucleic acid fragment which may comprise the 5′ oligonucleotide label and a nucleic acid fragment which may comprise the 3′ oligonucleotide label; and
[0162] (d) ligating the 5′ oligonucleotide label and the 3′ oligonucleotide label nucleic acid, thereby ligating the nucleic acid fragment which may comprise the 5′ oligonucleotide label and the nucleic acid fragment which may comprise the 3′ oligonucleotide label, thereby producing a ligated nucleic acid.

[0163] In some embodiments, the 5′ oligonucleotide label and/or the 3′ oligonucleotide may comprise a biotin label. In some embodiments, the method further may comprise (e) sequencing the ligated nucleic acid. In some embodiments, the DNA fragmenting agent is Nextera.

[0164] In another embodiment, the method may comprise:
[0165] (a) providing a population of library droplets which may comprise nucleic acids, wherein each droplet may comprise a nucleic acid which may comprise an oligonucleotide adapter,
[0166] (b) melting the nucleic acid;
[0167] (c) fusing each individual library droplet which may comprise a melted nucleic acid with a single index droplet from a plurality of m₁ index droplets, each index droplet which may comprise a first unique single-stranded detectable oligonucleotide tag, wherein the first unique single-stranded detectable oligonucleotide tag may comprise a region complementary to the oligonucleotide adapter,
[0168] (d) annealing the first unique single-stranded detectable oligonucleotide tag to the nucleic acid and performing a fill-in reaction, thereby producing an end-labeled nucleic;
[0169] (e) harvesting end-labeled nucleic acids from the fused droplets and generating another population of library droplets, wherein each droplet may comprise an end-labeled nucleic acid;
[0170] (f) melting the end-labeled nucleic acid;
[0171] (g) fusing each individual library droplet which may comprise a melted end-labeled nucleic acid with a single index droplet from a plurality of m₂ index droplets, each index droplet which may comprise a second unique single-stranded detectable oligonucleotide tag, wherein the second unique single-stranded detectable oligonucleotide tag may comprise a region complementary to the first unique single-stranded detectable oligonucleotide tag;
[0172] (h) annealing the second unique single-stranded detectable oligonucleotide tag to the nucleic acid and performing a fill-in reaction, thereby producing an end-labeled nucleic acid;
[0173] (i) harvesting end-labeled nucleic acid molecules from the fused droplets and generating another population of library droplets which may comprise end-labeled nucleic acids; and
[0174] (j) repeating steps (f) to (i) n times to produce nucleic acids end-labeled with n detectable oligonucleotide tags, wherein the n detectable oligonucleotide tags generate an (m₁)(m₂)(m₃) . . . (mₙ) number of combinations that is greater than the number of starting nucleic acids.

[0175] In another embodiment, the method may comprise:
[0176] sequentially end-labeling nucleic acids in a plurality, at their 5′ and 3′ ends, with a random combination of n detectable oligonucleotide tags,
[0177] wherein each end-labeled nucleic acid is
   [0178] (a) identically labeled at its 5′ and 3′ ends, and
   [0179] (b) uniquely labeled relative to other nucleic acids in the plurality,
[0180] wherein each detectable oligonucleotide tags is randomly and independently selected from a number of detectable oligonucleotide tags that is less than the number of nucleic acids, and n is the number of oligonucleotides attached to an end of a nucleic acid.

[0181] In some embodiments, the further may comprise fragmenting end-labeled nucleic acids into at least a 5′ fragment which may comprise the 5′ end of the nucleic acid attached to the random combination of n detectable oligonucleotide tags and into a 3′ fragment which may comprise the 3′ end of the nucleic acid attached to the random combination of n detectable oligonucleotide tags. In some embodiments, the 5′ and 3′ fragments are about 10-1000 bases (base pairs) in length, or about 10-500 bases in length, or about 10-200 bases in length. In some embodiments, the method further may comprise sequencing the 5′ and 3′ fragments.

[0182] In another embodiment, the method may comprise:
[0183] sequencing a pair of genomic nucleic acid fragments, wherein the genomic nucleic acid fragments are attached to identical unique labels at one of their ends that indicates the genomic nucleic acid fragments were separated by a known distance in a genome prior to fragmentation.

[0184] In some embodiments, the pair of nucleic acid fragments were separated by greater than 10 kb in the genome prior to fragmentation. In another embodiment, the pair of nucleic acid fragments were separated by greater than 40 kb in the genome prior to fragmentation. In some embodiments, the method further may comprise generating the pair of genomic nucleic acid fragments by fragmenting nucleic acids which may comprise genomic sequence and identical non-genomic sequence at their 5′ and 3′ ends.

[0185] In another aspect, the invention provides compositions. In one embodiment, the composition may comprise:
[0186] a plurality of paired nucleic acid fragments attached to unique labels at one end,
[0187] wherein paired nucleic acid fragments:
   [0188] (a) share an identical unique label at one end that is unique in the plurality, and
   [0189] (b) were separated from each other in a genome by a known distance prior to fragmentation.

[0190] In some embodiments, paired nucleic acid fragments were separated by greater than 10 kb in the genome prior to fragmentation. In another embodiment, the paired nucleic acid fragments were separated by greater than 40 kb in the genome prior to fragmentation. In some embodiments, the composition is produced using any of the methods described herein.

[0191] Examples of nucleic acids include, but are not limited to, genomic DNA, cDNA, PCR products, mRNA, total RNA, plasmids, or fragments thereof. In some embodiments, the nucleic acids are genomic DNA, cDNA, PCR products, or fragments thereof. Nucleic acids can be fragmented using methods described herein.

[0192] In some embodiments, the method further may comprise fragmenting uniquely end-labeled nucleic acids. Fragmenting of nucleic acids can be accomplished by methods described herein and those well-known in the art.

[0193] In one embodiment, the method may comprise sequencing a pair of genomic nucleic acid fragments, wherein the genomic nucleic acid fragments are attached to identical unique labels at one of their ends that indicates the genomic nucleic acid fragments were separated by a known distance in a genome prior to fragmentation. In some embodiments, the known distance is greater than 5, 10, 15, 20, 30, 40, 50, 100 kb or greater separation. Genomic nucleic acid fragments can come from any organismal genomic DNA, for example, human, mammalian, bacterial, fungal or plant genomic DNA. Genomic nucleic acid fragments can be generated by fragmentation methods known in the art (see, e.g., Green and Sambrook. Molecular Cloning: A Laboratory Manual, Fourth Edition, 2012). Examples of fragmentation include, but are not limited to, enzymatic (such as a nuclease), chemical (such as a DNA nicking agent) or mechanical (such as sonication) fragmentation. Fragmentation can be random, e.g., sequence and size unspecific, or ordered, e.g., sequence dependent and/or size-restricted. The fragments generated following label addition can be tailored to the limitations of the desired detection technology. For example, the fragments can be hundreds, thousands, millions or potentially billions of base pairs in length depending on the technology used to sequence the DNA.

### EXAMPLES

[0194] The following Examples are meant for illustrative purposes, and are not meant to be exclusive or limiting.

### Example 1

### Polymerase-Mediated Bioinformatic Association of Nucleic Acid Ends for Mate-Pair Analysis

[0195] Generation of End-Labeled Genomic DNA Fragments

[0196] A method for bioinformatically associating the ends of genomic DNA is outlined in FIG. 2. Genomic DNA is fragmented and size selected to a known size using techniques known in the art (e.g., sonication, cavitation, point-sink or mechanical shearing, or a DNA fragmenting enzyme and size-exclusion columns or gel purification). The genomic DNA is then A-tailed and ligated to a biotinylated, T-tailed asymmetric oligonucleotide adapter using methods known in the art (see, e.g. Maniatis, Molecular Cloning). Klenow exo-enzyme is commonly used to add a single nucleotide to the 3′ termini of DNA fragments). The adapter is a partial duplex to allow for annealing of the single-stranded oligonucleotide indexes described below.

[0197] One or more index libraries (preferably 1-4 libraries) are created such that each library contains approximately >1000 unique single-stranded oligonucleotide indexes, thus approximately 2000-4000 unique indexes are used. Index libraries may be created in droplets using standard flow focusing techniques. For a given library, each droplet will contain many copies of one unique single-stranded index. Droplets may contain some or all of the key components of a polymerase fill-in reaction (e.g., MgCl₂, dNTP, and Polymerase). Each unique single-stranded oligonucleotide index contains 3 distinct regions: sequence complimentary to the adapter (Ad) or to a previously added index sequence (B or C), a unique index sequence (Idx), and a sequence used to “capture” the next index oligonucleotide index which contains one or more dUTP nucleotides (B′/C′).

[0198] Fragmented genomic DNA ligated to an adapter is diluted to a desired concentration to control the number of molecules per droplet (e.g., a single DNA molecule per droplet or more than a single DNA molecule per droplet) and merged with (see above references for droplet merging) the first index library (Library “A” in FIG. 2).

[0199] The Ad region of each unique single-stranded oligonucleotide index binds to the adapter on each end of the fragmented genomic DNA molecule. A polymerase-mediated fill-in reaction is performed in each droplet, creating the complement to the index and capture regions on the each unique single-stranded oligonucleotide index a, and thus generating unique double-stranded oligonucleotide indexes.

[0200] Emulsion droplets are then broken using various mechanical or chemical reagents depending on the oil/surfactant utilized in the emulsion, resulting in the combination and mixing of the DNA from each droplet. Mixed DNA is then treated with USER™ enzyme (Uracil-Specific Excision Reagent, New England BioLabs Inc., Ipswich, Mass.), causing the capture portion of the double-stranded oligonucleotide index to be digested due to the presence of one or more dUTP nucleotides. This digestion reveals the nascent strand, which is complementary to a sequence contained in the next library of indexes (Library “B” in FIG. 2).

[0201] The process of fragmented genomic DNA dilution, merging with a droplet library, polymerase fill-in, breaking the droplets, and treatment with USER™ enzyme is repeated for the desired number of cycles, each time adding one new unique oligonucleotide index sequence to both ends of the fragmented genomic DNA.

[0202] After the final index addition, the result is fragmented genomic DNA uniquely end-labeled on both the 5′ and 3′ end with a unique label made up of many oligonucleotide indexes. The uniquely end-labeled fragmented genomic is then fragmented and the ends are collected via streptavidin beads, which recognized the biotin label on the adapter. Fragments can be ligated to technology specific sequencing adapters (e.g., Illumina adapters) and sequenced. Ends are informatically paired by matching the unique label on one fragment of DNA with the same unique label on the other fragment of DNA (see FIG. 7).

[0203] This method of bioinformatics association can also be used with other types of nucleic acids, such as RNA, cDNA, or PCR-amplified DNA, or any other type of construct where such a labeling scheme is required.

### Example 2

### Ligation-Mediated Bioinformatic Association of Nucleic Acid Ends in Emulsions for Mate-Pair Analysis

[0204] Validation of Ligation in Emulsions

[0205] A 34 bp adapter was designed. The adapter was biotinylated and T-tailed to force directionality of ligation to A-tailed lambda genomic DNA. Ligation was performed in an tube or an emulsion using 50 ng of lambda DNA and 50 ng of adapter. Lambda DNA was used as it is unlikely to form circles. Droplets were created by standard techniques (e.g., flow focusing at a T-junction using a PDMS-based microfluidic chip). Channel 1 contained DNA in ligase buffer (500 microliters) and channel 2 contained Quick Ligase in ligase buffer (500 microliters). PCR primers were designed to amplify internally within the lambda DNA (ligation-independent) or to amplify a portion of the adapter and the 5′ or 3′ end of the lambda DNA (ligation-dependent). Negative controls were performed in tubes to ensure ligation was ligase-dependent.

[0206] FIG. 3 shows that ligation was achieved in both tubes and emulsion droplets. The forward primer for the adapter and the 5′ primer for the lambda DNA only amplified in the presence of ligase, indicating that the adapter and the 5′ end of the lambda DNA had ligated together in both tubes and emulsion droplets. The same result was achieved using the reverse primer for the adapter and the 3′ primer for the lambda DNA, indicating that the adapter and the 3′ end of the lambda DNA had ligated together in both tubes and emulsion droplets. These results demonstrate that ligation can be successfully performed in emulsion droplets.

[0207] Generation of End-Labeled Genomic DNA Fragments

[0208] A method for bioinformatically associating the ends of genomic DNA is outlined in FIG. 7. Genomic DNA is fragmented and size selected to a known size using techniques known in the art as described in Example 1. The genomic DNA is then A-tailed and ligated to a biotinylated, T-tailed asymmetric oligonucleotide adapter using methods well known in the art as described in Example 1.

[0209] Multiple droplet libraries (preferably 2-4 libraries) are created such that each library contains approximately 1000 unique double-stranded oligonucleotide indexes, thus approximately 2000-4000 unique indexes are used. For a given library, each droplet will contain many copies of one unique double-stranded index. Droplets may contain some or all of the key components of a ligation reaction (e.g., MgCl₂, ATP, Ligase).

[0210] Fragmented genomic DNA ligated to an adapter is diluted to a desired concentration to control the number of molecules per droplet (e.g., a single DNA molecule per droplet or more than a single DNA molecule per droplet) and merged with the first index droplet library (Droplet Library “A” in FIG. 4).

[0211] A ligation reaction is performed in each droplet, joining each unique double-stranded oligonucleotide index to the adapter on each end of the genomic DNA. The emulsion is then broken and the DNA is phosphorylated so that a second index can be ligated to the end of the first index.

[0212] The process of fragmented genomic DNA dilution, merging with a droplet library (e.g. Droplet Library “B” or “C” in FIG. 4), ligation, breaking the droplets, and phosphorylation is repeated for the desired number of cycles, each time adding one new unique oligonucleotide index sequence to both ends of the fragmented genomic DNA.

[0213] After the final index addition, the result is fragmented genomic DNA uniquely end-labeled on both the 5′ and 3′ end with a unique label made up of many oligonucleotide indexes. The uniquely end-labeled fragmented genomic is then further fragmented and the ends are collected via streptavidin beads, which recognized the biotin label on the adapter. Fragments can be ligated to technology specific sequencing adapters (e.g., Illumina adapters) and sequenced. Ends are informatically paired by matching the unique label on one fragment of DNA with the same unique label on the other fragment of DNA as described in Example 1.

[0214] As with Example 1, this method can be used for other types of nucleic acids, such as RNA, cDNA, or PCR-amplified DNA, or any other type of construct where such a labeling scheme is required

[0215] Validation of Ligation-Mediated End-Labeling

[0216] Three libraries were created “in bulk” in microcentrifuge tubes from fragmented, end-repaired, A-tailed E. coli genomic DNA. For all three libraries, an initial ligation reaction was performed to add on a generic adapter to the ends of the E. coli genomic DNA. Genomic DNA libraries were then subjected to 1 (Library 1). 2 (Library 2), or 3 (Library 3) rounds of index ligation. Index ligation was performed by joining unique double-stranded oligonucleotide indexes to the adapter on each end of the genomic DNA. If required, the DNA was phosphorylated so that a second index could ligated to the end of the first index (two rounds of index ligation) or a third index could be ligated to the end of a second index (three rounds of index ligation). For round 1 and round 3 of index ligation, the same library/pool of indexes was used (pool A). For round 2, a library/pool of different indexes was used (pool B). As a final step, Illumina indexed adapters were ligated to all three genomic DNA libraries. Libraries were then pooled and sequence on an Illumina MiSeq (Illumina, San Diego, Calif.) using standard Illumina sequencing primers. Paired reads were identified and analyzed en masse (i.e. data from read 1 (3′ end read) and read 2 (5′ end read) was analyzed together as a single population). Sequencing data was analyzed by breaking up the reads into four separate, linear 8-mer populations (i.e. positions 1 through 4 in the read), since the indexes were each 8 bp in length. For each position, the number of reads containing index or adapter were measured.

[0217] FIGS. 13 and 14 depict the results of the total read population analysis (en masse analysis) of the index ligation method. Library 1, which underwent 1 round of index ligation, had an expected outcome of an index read in position 1 and an adapter read in position 2. Library 2, which underwent 2 rounds of index ligation, had an expected outcome of an index read in position 1 and 2 and an adapter read in position 3. Library 3, which underwent 3 rounds of index ligation, had an expected outcome of an index read in position 1 to 3 and an adapter read in position 4.

[0218] FIG. 15 depicts the results of read pair analysis of individual molecules that underwent the index ligation method. Instead of analyzing the data from read 1 (3′ end read) and read 2 (5′ end read) together, reads were paired so that a molecule-by-molecule analysis was performed. First, reads were paired based on their unique read identifier. Each read was then broken down into 4 positions (8-mers) per read as described above. For each library, the total number of read pairs and the total number of unique molecular outcomes were determined and are shown in FIG. 5 (Figure N). The composition of the top 10 most prevalent molecular outcomes and the number of pairs for each outcome are also shown in FIG. 5 (Figure N). It was determined that the most desired outcome (the correct expected outcome) occurred 6% of the time in Library 1, 4% of the time in Library 2, and 4% of the time in Library 3.

[0219] Thus, FIGS. 13-15 show that the expected outcome was achieved and thus index ligation was a valid method of generating a unique label.

### Example 3

### Fragment Amplification

[0220] To increase the number of read pairs properly mated via their unique index combination, three methods are proposed to maximize fragment end recovery. These methods utilize the fragment preparation and indexing techniques described above, but vary in their approach to recovering and amplifying fragment ends within the library construction process.

[0221] Transposome-Based Selection and Amplification of Ends

[0222] As shown in FIG. 22, DNA samples are sheared to a desired size then the “Cap” and random combinations of index sequences are symmetrically attached to the fragment ends via ligation. Following the final round of index ligation, a new adapter containing an Illumina sequencing primer (SP1) adjacent to the Illumina P7 sequence is attached to the ends of the molecules via ligation as described above. The population of molecules is then incubated in the presence of a transposome carrying a different Illumina sequencing primer (SP2) adjacent to the Illumina P5 sequence. This reaction creates many fragments where both ends are flanked by the Illumina P5 sequence, but only two fragments per molecule that carry both the Illumina P7 and P5 sequences. PCR amplification using primers to P5/P7 is performed in order to enrich/select the fragment ends.

[0223] Enrichment of Ends Via In Vitro Transcription

[0224] As seen in FIGS. 23a and b, DNA samples are sheared to a desired size then the Cap and random combinations of index sequences are symmetrically attached to the fragment ends via ligation. Following the final round of index ligation, a new adapter sequence containing an Illumina sequencing primer (SP1) adjacent to an optimized T7 RNA polymerase promoter is attached to the ends of the molecules via ligation as described above. In vitro transcription (IVT) via T7 RNA polymerase is then performed in order to amplify both ends of a given molecule. Following IVT, a primer containing a random nucleotide sequence of a set length (i.e., pentamer, hexamer, etc.) flanked by a different Illumina sequencing primer (SP2) is utilized as the primer in a reverse transcription reaction. Alternatively, RNA molecules may be trimmed to a desired size range and ligated to the Illumina sequencing primer (SP2) via standard techniques. Illumina P5 and P7 sites are then added to the cDNA via PCR using primers carrying Illumina P5-SP1 and P7-SP2 sequences.

[0225] Amplification of Ends Via Anchored PCR

[0226] As shown in FIG. 24, DNA samples are sheared to a desired size then the Cap and random combinations of index sequences are symmetrically attached to the fragment ends via ligation. Following the final round of index ligation, a new adapter containing an Illumina sequencing primer (SP1) adjacent to the Illumina P7 sequence is attached to the ends of the molecules via ligation as described above. The population of molecules is then incubated in the presence of Fragmentase or a cocktail of restriction endonucleases to liberate the ends of the molecules. Fragments are then tailed at the 3′ end using terminal transferase to attach a set number of specific nucleotides to the fragment ends, effectively creating a common priming sequence on the ends of all molecules. Alternatively, priming sequences may be ligated to the 3′ of the molecules using standard techniques. The fragments are then amplified via PCR using SP2-P7 and SP1-P5 primers where the SP1-P5 primer contains a tail complementary to the priming site attached in the previous step.

[0227] The invention will be further described by the following numbered paragraphs:

[0228] 1. A method for labeling a nucleic acid at both its 5′ and 3′ ends with a unique label, comprising the steps of:
[0229] a) providing a pool of nucleic acids; and
[0230] b) sequentially end-labeling said nucleic acids with a random combination of n detectable oligonucleotide tags, each of said oligonucleotide tags optionally comprising a cohesive overhang of x base pairs in length, wherein each detectable oligonucleotide tag is randomly and independently selected from a number of detectable oligonucleotide tags that is less than the number of nucleic acids, and n is the number of oligonucleotides attached to an end of said nucleic acid,

[0231] wherein said method is performed in emulsion droplets, and

[0232] wherein each end-labeled nucleic acid is identically labeled at its 5′ and 3′ ends.

[0233] 2. The method according to paragraph 1, wherein x is greater than about two base pairs.

[0234] 3. The method according to paragraph 1, wherein x is from about two to about ten base pairs.

[0235] 4. The method according to paragraph 1, wherein x is about four base pairs.

[0236] 5. The method according to paragraph 1, wherein said detectable oligonucleotide tag is from about 10 to about 20 base pairs in length.

[0237] 6. The method according to paragraph 3, wherein said oligonucleotide tag is selected from a tag in Table 1.

[0238] 7. The method according to paragraph 1, wherein n is 2, 3, 4, 5, 6, 7, 8, 9, 10, 10², 10³, 10⁴, 10⁵, or 10⁶ or more detectable oligonucleotide tags.

[0239] 8. A method, comprising:
[0240] sequentially attaching at least two detectable oligonucleotide tags to a 5′ and/or 3′ end a first nucleic acid, wherein each detectable oligonucleotide tag is randomly selected from a plurality of detectable oligonucleotide tags, thereby generating a second nucleic acid comprising the first nucleic acid attached at its 5′ and/or 3′ end with a unique combination of detectable oligonucleotide tags, wherein the plurality of second nucleic acids is generated using emulsion droplets.

[0241] 9. The method of paragraph 8, wherein the first nucleic acid is a genomic DNA fragment.

[0242] 10. The method of paragraph 9, wherein the second nucleic acid is a genomic DNA fragment attached to the unique combination of detectable oligonucleotide tags at its 5′ or 3′ end.

[0243] 11. The method of paragraph 9, wherein the second nucleic acid is a genomic DNA fragment attached to the same unique combination of detectable oligonucleotide tags at its 5′ and 3′ end.

[0244] 12. The method of paragraph 9, further comprising fragmenting the second nucleic acid.

[0245] 13. The method of paragraph 8, wherein sequentially attaching the at least two detectable oligonucleotide tags to the first nucleic acid comprises ligation, polymerization, or a combination thereof.

[0246] 14. A method, comprising:
[0247] (a) providing a population of library droplets comprising nucleic acids, wherein each droplet comprises a nucleic acid;
[0248] (b) fusing each individual library droplet with a single index droplet from a plurality of m₁ index droplets, each index droplet comprising a plurality of one unique detectable oligonucleotide tag;
[0249] (c) end-labeling the nucleic acid with the unique detectable oligonucleotide tag in a fused droplet;
[0250] (d) harvesting end-labeled nucleic acids from the fused droplets and generating another population of library droplets comprising end-labeled nucleic acids;
[0251] (e) repeating steps (b) to (d) n times to produce nucleic acids end-labeled with n unique detectable oligonucleotide tag, wherein the n unique detectable oligonucleotide tags generate an (m₁)(m₂)(m₃) . . . (mₙ) number of combinations that is greater than the number of starting nucleic acids; and
[0252] (f) amplifying the end-labeled nucleic acid formed in step (e).

[0253] 15. The method of any one of paragraph 14, wherein end-labeling comprises ligation of the unique oligonucleotide tag with the nucleic acid.

[0254] 16. The method of paragraph 15, wherein the unique oligonucleotide tag is double-stranded.

[0255] 17. The method of according to paragraph 14, further comprising phosphorylating the nucleic acids between steps (b) and (c).

[0256] 18. The method of according to paragraph 14, wherein end-labeling comprises a polymerase-mediated fill-in reaction.

[0257] 19. The method of paragraph 18, wherein the polymerase-mediated fill-in reaction comprises:
[0258] (a) producing a single-stranded cohesive overhang on the nucleic acid, wherein the cohesive overhang is complementary to one end of the unique detectable oligonucleotide tag;
[0259] (b) annealing the complementary end of the unique oligonucleotide tag to the single-stranded cohesive overhang such that at least one nucleotide of the unique detectable oligonucleotide tag is not annealed to the nucleic acid, producing a unique detectable oligonucleotide tag cohesive overhang; and
[0260] (c) extending the single-stranded cohesive overhang of (a) using a polymerase and nucleotides complementary to the unique detectable oligonucleotide tag cohesive overhang to produce a double-stranded unique detectable oligonucleotide tag.

[0261] 20. The method of paragraph 19, wherein the single-stranded cohesive overhang on the nucleic acid is produced by a USER enzyme.

[0262] 21. The method of according to paragraph 19, wherein the unique detectable oligonucleotide tag is single-stranded.

[0263] 22. The method of according to paragraph 19, wherein an oligonuclcotide adapter is added to the nucleic acids before labeling with the unique detectable oligonucleotide tags.

[0264] 23. The method of paragraph 20, wherein the adapter comprises biotin.

[0265] 24. The method of paragraph 20, wherein the adapter comprises a thymidine tail cohesive overhang.

[0266] 25. The method of paragraph 19, wherein labeling occurs at the 5′ and 3′ ends of the nucleic acid.

[0267] 26. The method of paragraph 19, wherein labeling occurs at the 5′ or the 3′ end of the nucleic acid.

[0268] 27. A labeled nucleic acid obtainable by the method of paragraph 1.

[0269] 28. The method of paragraph 15, wherein amplification step (f) comprises the steps of:
[0270] (i) attaching an adapter comprising a first sequencing primer to said nucleic acid;
[0271] (ii) incubating said nucleic acid in the presence of a transposome comprising a second sequencing primer; and
[0272] (iii) performing PCR amplification so as to amplify the ends of said nucleic acid.

[0273] 29. The method of paragraph 14, wherein amplification step (f) comprises the steps of:
[0274] (i) attaching an adapter comprising a first sequencing primer to said nucleic acid;
[0275] (ii) performing in vitro transcription using a RNA polymerase;
[0276] (iii) performing a reverse transcription using a primer comprising a random nucleotide sequence of a given length flanked by a second sequencing primer or performing a reverse transcription using a primer comprising a nucleotide sequence attached to the 3′ end of the nucleic acid; and
[0277] (iv) performing PCR amplification so as to amplify the ends of said nucleic acid.

[0278] 30. The method of paragraph 14, wherein amplification step (f) comprises the steps of:
[0279] (i) attaching an adapter comprising a first sequencing primer to said nucleic acid;
[0280] (ii) incubating said nucleic acid in fragmentase or a combination of one or more restriction endonucleases so as to liberate the ends of said nucleic acid thereby forming fragments;
[0281] (iii) attaching a given number of specific nucleotides to the ends of said fragments; and
[0282] (iv) performing PCR amplification on the fragments formed in step (iii) using a second sequencing primer.

[0283] It is to be understood that the invention is not limited to the particular embodiments of the invention described above, as variations of the particular embodiments may be made and still fall within the scope of the appended claims.

What is claimed is:

1. A method for labeling a nucleic acid at both its 5′ and 3′ ends with a unique label, comprising the steps of:
a) providing a pool of nucleic acids; and
b) sequentially end-labeling said nucleic acids with a random combination of n detectable oligonucleotide tags, each of said oligonucleotide tags optionally comprising a cohesive overhang of x base pairs in length, wherein each detectable oligonucleotide tag is randomly and independently selected from a number of detectable oligonucleotide tags that is less than the number of nucleic acids, and n is the number of oligonucleotides attached to an end of said nucleic acid,
wherein said method is performed in emulsion droplets, and
wherein each end-labeled nucleic acid is identically labeled at its 5′ and 3′ ends. nucleic acid

2. The method according to claim 1, wherein x is greater than about two base pairs.

3. The method according to claim 1, wherein x is from about two to about ten base pairs.

4. The method according to claim 1, wherein x is about four base pairs.

5. The method according to claim 1, wherein said detectable oligonucleotide tag is from about 10 to about 20 base pairs in length.

6. The method according to claim 3, wherein said oligonucleotide tag is selected from a tag in Table 1.

7. The method according to claim 1, wherein n is 2, 3, 4, 5, 6, 7, 8, 9, 10, 10², 10³, 10⁴, 10⁵, or 10⁶ or more detectable oligonucleotide tags.

8. A method, comprising:
sequentially attaching at least two detectable oligonucleotide tags to a 5′ and/or 3′ end a first nucleic acid, wherein each detectable oligonucleotide tag is randomly selected from a plurality of detectable oligonucleotide tags, thereby generating a second nucleic acid comprising the first nucleic acid attached at its 5′ and/or 3′ end with a unique combination of detectable oligonucleotide tags, wherein the plurality of second nucleic acids is generated using emulsion droplets.

9. The method of claim 8, wherein the first nucleic acid is a genomic DNA fragment.

10. The method of claim 9, wherein the second nucleic acid is a genomic DNA fragment attached to the unique combination of detectable oligonucleotide tags at its 5′ or 3′ end.

11. The method of claim 9, wherein the second nucleic acid is a genomic DNA fragment attached to the same unique combination of detectable oligonucleotide tags at its 5′ and 3′ end.

12. The method of claim 9, further comprising fragmenting the second nucleic acid.

13. The method of claim 8, wherein sequentially attaching the at least two detectable oligonucleotide tags to the first nucleic acid comprises ligation, polymerization, or a combination thereof.

14. A method, comprising:
(a) providing a population of library droplets comprising nucleic acids, wherein each droplet comprises a nucleic acid;
(b) fusing each individual library droplet with a single index droplet from a plurality of m₁ index droplets, each index droplet comprising a plurality of one unique detectable oligonucleotide tag;
(c) end-labeling the nucleic acid with the unique detectable oligonucleotide tag in a fused droplet;
(d) harvesting end-labeled nucleic acids from the fused droplets and generating another population of library droplets comprising end-labeled nucleic acids;
(e) repeating steps (b) to (d) n times to produce nucleic acids end-labeled with n unique detectable oligonucleotide tag, wherein the n unique detectable oligonucleotide tags generate an (m₁)(m₂)(m₃) . . . (mₙ) number of combinations that is greater than the number of starting nucleic acids; and
(f) amplifying the end-labeled nucleic acid formed in step (e).

15. The method of any one of claim 14, wherein end-labeling comprises ligation of the unique oligonucleotide tag with the nucleic acid.

16. The method of claim 15, wherein the unique oligonucleotide tag is double-stranded.

17. The method of according to claim 14, further comprising phosphorylating the nucleic acids between steps (b) and (c).

18. The method of according to claim 14, wherein end-labeling comprises a polymerase-mediated fill-in reaction.

19. The method of claim 18, wherein the polymerase-mediated fill-in reaction comprises:
(a) producing a single-stranded cohesive overhang on the nucleic acid, wherein the cohesive overhang is complementary to one end of the unique detectable oligonucleotide tag;
(b) annealing the complementary end of the unique oligonucleotide tag to the single-stranded cohesive overhang such that at least one nucleotide of the unique detectable oligonucleotide tag is not annealed to the nucleic acid, producing a unique detectable oligonucleotide tag cohesive overhang; and
(c) extending the single-stranded cohesive overhang of (a) using a polymerase and nucleotides complementary to the unique detectable oligonucleotide tag cohesive overhang to produce a double-stranded unique detectable oligonucleotide tag.

20. The method of claim 19, wherein the single-stranded cohesive overhang on the nucleic acid is produced by a USER enzyme.

21. The method of according to claim 19, wherein the unique detectable oligonucleotide tag is single-stranded.

22. The method of according to claim 19, wherein an oligonucleotide adapter is added to the nucleic acids before labeling with the unique detectable oligonucleotide tags.

23. The method of claim 20, wherein the adapter comprises biotin.

24. The method of claim 20, wherein the adapter comprises a thymidine tail cohesive overhang.

25. The method of claim 19, wherein labeling occurs at the 5′ and 3′ ends of the nucleic acid.

26. The method of claim 19, wherein labeling occurs at the 5′ or the 3′ end of the nucleic acid.

27. The method of claim 15, wherein amplification step (f) comprises the steps of:
(i) attaching an adapter comprising a first sequencing primer to said nucleic acid;
(ii) incubating said nucleic acid in the presence of a transposome comprising a second sequencing primer; and
(iii) performing PCR amplification so as to amplify the ends of said nucleic acid.

28. The method of claim 14, wherein amplification step (f) comprises the steps of:
(i) attaching an adapter comprising a first sequencing primer to said nucleic acid;
(ii) performing in vitro transcription using a RNA polymerase;
(iii) performing a reverse transcription using a primer comprising a random nucleotide sequence of a given length flanked by a second sequencing primer or performing a reverse transcription using a primer comprising a nucleotide sequence attached to the 3′ end of the nucleic acid; and
(iv) performing PCR amplification so as to amplify the ends of said nucleic acid.

29. The method of claim 14, wherein amplification step (f) comprises the steps of:
(i) attaching an adapter comprising a first sequencing primer to said nucleic acid;
(ii) incubating said nucleic acid in fragmentase or a combination of one or more restriction endonucleases so as to liberate the ends of said nucleic acid thereby forming fragments;
(iii) attaching a given number of specific nucleotides to the ends of said fragments; and
(iv) performing PCR amplification on the fragments formed in step (iii) using a second sequencing primer.

The application's sequence listing, which the Patent Office published only in electronic form, follows.

SEQUENCE LISTING (2325 sequences)

SEQ ID NO: 1 - DNA, 20 bp, Artificial Sequence
  Description of Artificial Sequence: Synthetic oligonucleotide
ggatatctgtggatatctgt

SEQ ID NO: 2 - DNA, 20 bp, Artificial Sequence
  Description of Artificial Sequence: Synthetic oligonucleotide
ggctgccataggctgccata

SEQ ID NO: 3 - DNA, 20 bp, Artificial Sequence
  Description of Artificial Sequence: Synthetic oligonucleotide
ggtatgtcaaggtatgtcaa

SEQ ID NO: 4 - DNA, 20 bp, Artificial Sequence
  Description of Artificial Sequence: Synthetic oligonucleotide
ggtgaaggacggtgaaggac

SEQ ID NO: 5 - DNA, 20 bp, Artificial Sequence
  Description of Artificial Sequence: Synthetic oligonucleotide
gtaccagcatgtaccagcat

SEQ ID NO: 6 - DNA, 20 bp, Artificial Sequence
  Description of Artificial Sequence: Synthetic oligonucleotide
gtatacatccgtatacatcc

SEQ ID NO: 7 - DNA, 20 bp, Artificial Sequence
  Description of Artificial Sequence: Synthetic oligonucleotide
gtatcgctcagtatcgctca

SEQ ID NO: 8 - DNA, 20 bp, Artificial Sequence
  Description of Artificial Sequence: Synthetic oligonucleotide
gtccgatggagtccgatgga

SEQ ID NO: 9 - DNA, 20 bp, Artificial Sequence
  Description of Artificial Sequence: Synthetic oligonucleotide
gtgtggaattgtgtggaatt

SEQ ID NO: 10 - DNA, 20 bp, Artificial Sequence
  Description of Artificial Sequence: Synthetic oligonucleotide
gtgtggcagagtgtggcaga

SEQ ID NO: 11 - DNA, 20 bp, Artificial Sequence
  Description of Artificial Sequence: Synthetic oligonucleotide
gttacggtgagttacggtga

SEQ ID NO: 12 - DNA, 20 bp, Artificial Sequence
  Description of Artificial Sequence: Synthetic oligonucleotide
gttcgtacatgttcgtacat

SEQ ID NO: 13 - DNA, 20 bp, Artificial Sequence
  Description of Artificial Sequence: Synthetic oligonucleotide
taaccggtaataaccggtaa

SEQ ID NO: 14 - DNA, 20 bp, Artificial Sequence
  Description of Artificial Sequence: Synthetic oligonucleotide
tacagagtcatacagagtca

SEQ ID NO: 15 - DNA, 20 bp, Artificial Sequence
  Description of Artificial Sequence: Synthetic oligonucleotide
taccgagatataccgagata

SEQ ID NO: 16 - DNA, 20 bp, Artificial Sequence
  Description of Artificial Sequence: Synthetic oligonucleotide
tacgcatcgctacgcatcgc

SEQ ID NO: 17 - DNA, 20 bp, Artificial Sequence
  Description of Artificial Sequence: Synthetic oligonucleotide
tacgcgcttgtacgcgcttg

SEQ ID NO: 18 - DNA, 20 bp, Artificial Sequence
  Description of Artificial Sequence: Synthetic oligonucleotide
tagacttcactagacttcac

SEQ ID NO: 19 - DNA, 20 bp, Artificial Sequence
  Description of Artificial Sequence: Synthetic oligonucleotide
tatcgcttagtatcgcttag

SEQ ID NO: 20 - DNA, 20 bp, Artificial Sequence
  Description of Artificial Sequence: Synthetic oligonucleotide
tcacgatccgtcacgatccg

SEQ ID NO: 21 - DNA, 20 bp, Artificial Sequence
  Description of Artificial Sequence: Synthetic oligonucleotide
tcagcttcgctcagcttcgc

SEQ ID NO: 22 - DNA, 20 bp, Artificial Sequence
  Description of Artificial Sequence: Synthetic oligonucleotide
tccggacttctccggacttc

SEQ ID NO: 23 - DNA, 20 bp, Artificial Sequence
  Description of Artificial Sequence: Synthetic oligonucleotide
tccggtatggtccggtatgg

SEQ ID NO: 24 - DNA, 20 bp, Artificial Sequence
  Description of Artificial Sequence: Synthetic oligonucleotide
tccgtggtgatccgtggtga

SEQ ID NO: 25 - DNA, 20 bp, Artificial Sequence
  Description of Artificial Sequence: Synthetic oligonucleotide
tcctcatccatcctcatcca

SEQ ID NO: 26 - DNA, 20 bp, Artificial Sequence
  Description of Artificial Sequence: Synthetic oligonucleotide
tccttctggatccttctgga

SEQ ID NO: 27 - DNA, 20 bp, Artificial Sequence
  Description of Artificial Sequence: Synthetic oligonucleotide
tcgctgttgctcgctgttgc

SEQ ID NO: 28 - DNA, 20 bp, Artificial Sequence
  Description of Artificial Sequence: Synthetic oligonucleotide
tcggagcttgtcggagcttg

SEQ ID NO: 29 - DNA, 20 bp, Artificial Sequence
  Description of Artificial Sequence: Synthetic oligonucleotide
tcggcatgagtcggcatgag

SEQ ID NO: 30 - DNA, 20 bp, Artificial Sequence
  Description of Artificial Sequence: Synthetic oligonucleotide
tcggtggaactcggtggaac

SEQ ID NO: 31 - DNA, 20 bp, Artificial Sequence
  Description of Artificial Sequence: Synthetic oligonucleotide
tcggttgtaatcggttgtaa

SEQ ID NO: 32 - DNA, 20 bp, Artificial Sequence
  Description of Artificial Sequence: Synthetic oligonucleotide
tcgtgtggcatcgtgtggca

SEQ ID NO: 33 - DNA, 20 bp, Artificial Sequence
  Description of Artificial Sequence: Synthetic oligonucleotide
tctgttccgctctgttccgc

SEQ ID NO: 34 - DNA, 20 bp, Artificial Sequence
  Description of Artificial Sequence: Synthetic oligonucleotide
tcttggcgtctcttggcgtc

SEQ ID NO: 35 - DNA, 20 bp, Artificial Sequence
  Description of Artificial Sequence: Synthetic oligonucleotide
tgattgagtctgattgagtc

SEQ ID NO: 36 - DNA, 20 bp, Artificial Sequence
  Description of Artificial Sequence: Synthetic oligonucleotide
tgcgttggcatgcgttggca

SEQ ID NO: 37 - DNA, 20 bp, Artificial Sequence
  Description of Artificial Sequence: Synthetic oligonucleotide
tggacatgcgtggacatgcg

SEQ ID NO: 38 - DNA, 20 bp, Artificial Sequence
  Description of Artificial Sequence: Synthetic oligonucleotide
tggcaagccatggcaagcca

SEQ ID NO: 39 - DNA, 20 bp, Artificial Sequence
  Description of Artificial Sequence: Synthetic oligonucleotide
tggttaactgtggttaactg

SEQ ID NO: 40 - DNA, 20 bp, Artificial Sequence
  Description of Artificial Sequence: Synthetic oligonucleotide
tgtacctgagtgtacctgag

SEQ ID NO: 41 - DNA, 20 bp, Artificial Sequence
  Description of Artificial Sequence: Synthetic oligonucleotide
tgtactacagtgtactacag

SEQ ID NO: 42 - DNA, 20 bp, Artificial Sequence
  Description of Artificial Sequence: Synthetic oligonucleotide
tgtcggttgctgtcggttgc

SEQ ID NO: 43 - DNA, 20 bp, Artificial Sequence
  Description of Artificial Sequence: Synthetic oligonucleotide
tgtctgtcggtgtctgtcgg

SEQ ID NO: 44 - DNA, 20 bp, Artificial Sequence
  Description of Artificial Sequence: Synthetic oligonucleotide
tgtgactatctgtgactatc

SEQ ID NO: 45 - DNA, 20 bp, Artificial Sequence
  Description of Artificial Sequence: Synthetic oligonucleotide
tgtgagtgcgtgtgagtgcg

SEQ ID NO: 46 - DNA, 20 bp, Artificial Sequence
  Description of Artificial Sequence: Synthetic oligonucleotide
tgtggttcgctgtggttcgc

SEQ ID NO: 47 - DNA, 20 bp, Artificial Sequence
  Description of Artificial Sequence: Synthetic oligonucleotide
tgttctctactgttctctac

SEQ ID NO: 48 - DNA, 20 bp, Artificial Sequence
  Description of Artificial Sequence: Synthetic oligonucleotide
ttagccagtcttagccagtc

SEQ ID NO: 49 - DNA, 20 bp, Artificial Sequence
  Description of Artificial Sequence: Synthetic oligonucleotide
ttcgcgaatattcgcgaata

SEQ ID NO: 50 - DNA, 20 bp, Artificial Sequence
  Description of Artificial Sequence: Synthetic oligonucleotide
ttcgcggtacttcgcggtac

SEQ ID NO: 51 - DNA, 20 bp, Artificial Sequence
  Description of Artificial Sequence: Synthetic oligonucleotide
ttctatgcagttctatgcag

SEQ ID NO: 52 - DNA, 20 bp, Artificial Sequence
  Description of Artificial Sequence: Synthetic oligonucleotide
ttcttaccgattcttaccga

SEQ ID NO: 53 - DNA, 20 bp, Artificial Sequence
  Description of Artificial Sequence: Synthetic oligonucleotide
ttgctctggattgctctgga

SEQ ID NO: 54 - DNA, 20 bp, Artificial Sequence
  Description of Artificial Sequence: Synthetic oligonucleotide
ttgtaacaccttgtaacacc

SEQ ID NO: 55 - DNA, 20 bp, Artificial Sequence
  Description of Artificial Sequence: Synthetic oligonucleotide
aacaagttccaacaagttcc

SEQ ID NO: 56 - DNA, 20 bp, Artificial Sequence
  Description of Artificial Sequence: Synthetic oligonucleotide
aacagcacgcaacagcacgc

SEQ ID NO: 57 - DNA, 20 bp, Artificial Sequence
  Description of Artificial Sequence: Synthetic oligonucleotide
aacgtgcggtaacgtgcggt

SEQ ID NO: 58 - DNA, 20 bp, Artificial Sequence
  Description of Artificial Sequence: Synthetic oligonucleotide
aagagcgatgaagagcgatg

SEQ ID NO: 59 - DNA, 20 bp, Artificial Sequence
  Description of Artificial Sequence: Synthetic oligonucleotide
aaggaattccaaggaattcc

SEQ ID NO: 60 - DNA, 20 bp, Artificial Sequence
  Description of Artificial Sequence: Synthetic oligonucleotide
aagtgaggcgaagtgaggcg

SEQ ID NO: 61 - DNA, 20 bp, Artificial Sequence
  Description of Artificial Sequence: Synthetic oligonucleotide
aatacgcgataatacgcgat

SEQ ID NO: 62 - DNA, 20 bp, Artificial Sequence
  Description of Artificial Sequence: Synthetic oligonucleotide
aataggttggaataggttgg

SEQ ID NO: 63 - DNA, 20 bp, Artificial Sequence
  Description of Artificial Sequence: Synthetic oligonucleotide
aatcgaagctaatcgaagct

SEQ ID NO: 64 - DNA, 20 bp, Artificial Sequence
  Description of Artificial Sequence: Synthetic oligonucleotide
acactacgatacactacgat

SEQ ID NO: 65 - DNA, 20 bp, Artificial Sequence
  Description of Artificial Sequence: Synthetic oligonucleotide
acactcagccacactcagcc

SEQ ID NO: 66 - DNA, 20 bp, Artificial Sequence
  Description of Artificial Sequence: Synthetic oligonucleotide
acatcgagccacatcgagcc

SEQ ID NO: 67 - DNA, 20 bp, Artificial Sequence
  Description of Artificial Sequence: Synthetic oligonucleotide
acattatgcgacattatgcg

SEQ ID NO: 68 - DNA, 20 bp, Artificial Sequence
  Description of Artificial Sequence: Synthetic oligonucleotide
accagcaactaccagcaact

SEQ ID NO: 69 - DNA, 20 bp, Artificial Sequence
  Description of Artificial Sequence: Synthetic oligonucleotide
accgaacacgaccgaacacg

SEQ ID NO: 70 - DNA, 20 bp, Artificial Sequence
  Description of Artificial Sequence: Synthetic oligonucleotide
accgaacggtaccgaacggt

SEQ ID NO: 71 - DNA, 20 bp, Artificial Sequence
  Description of Artificial Sequence: Synthetic oligonucleotide
acgagtggctacgagtggct

SEQ ID NO: 72 - DNA, 20 bp, Artificial Sequence
  Description of Artificial Sequence: Synthetic oligonucleotide
acggttacggacggttacgg

SEQ ID NO: 73 - DNA, 20 bp, Artificial Sequence
  Description of Artificial Sequence: Synthetic oligonucleotide
acgtaagcgcacgtaagcgc

SEQ ID NO: 74 - DNA, 20 bp, Artificial Sequence
  Description of Artificial Sequence: Synthetic oligonucleotide
actatgtgctactatgtgct

SEQ ID NO: 75 - DNA, 20 bp, Artificial Sequence
  Description of Artificial Sequence: Synthetic oligonucleotide
actggagtccactggagtcc

SEQ ID NO: 76 - DNA, 20 bp, Artificial Sequence
  Description of Artificial Sequence: Synthetic oligonucleotide
actgtacttcactgtacttc

SEQ ID NO: 77 - DNA, 20 bp, Artificial Sequence
  Description of Artificial Sequence: Synthetic oligonucleotide
agaagtctgcagaagtctgc

SEQ ID NO: 78 - DNA, 20 bp, Artificial Sequence
  Description of Artificial Sequence: Synthetic oligonucleotide
agacgcgagtagacgcgagt

SEQ ID NO: 79 - DNA, 20 bp, Artificial Sequence
  Description of Artificial Sequence: Synthetic oligonucleotide
agactgtgctagactgtgct

SEQ ID NO: 80 - DNA, 20 bp, Artificial Sequence
  Description of Artificial Sequence: Synthetic oligonucleotide
agagtacgccagagtacgcc

SEQ ID NO: 81 - DNA, 20 bp, Artificial Sequence
  Description of Artificial Sequence: Synthetic oligonucleotide
agatcgactgagatcgactg

SEQ ID NO: 82 - DNA, 20 bp, Artificial Sequence
  Description of Artificial Sequence: Synthetic oligonucleotide
agattcggccagattcggcc

SEQ ID NO: 83 - DNA, 20 bp, Artificial Sequence
  Description of Artificial Sequence: Synthetic oligonucleotide
agcaagtgctagcaagtgct

SEQ ID NO: 84 - DNA, 20 bp, Artificial Sequence
  Description of Artificial Sequence: Synthetic oligonucleotide
agccattgcgagccattgcg

SEQ ID NO: 85 - DNA, 20 bp, Artificial Sequence
  Description of Artificial Sequence: Synthetic oligonucleotide
agcggacagtagcggacagt

SEQ ID NO: 86 - DNA, 20 bp, Artificial Sequence
  Description of Artificial Sequence: Synthetic oligonucleotide
agcgtaagcgagcgtaagcg

SEQ ID NO: 87 - DNA, 20 bp, Artificial Sequence
  Description of Artificial Sequence: Synthetic oligonucleotide
agctattctcagctattctc

SEQ ID NO: 88 - DNA, 20 bp, Artificial Sequence
  Description of Artificial Sequence: Synthetic oligonucleotide
agcttatacgagcttatacg

SEQ ID NO: 89 - DNA, 20 bp, Artificial Sequence
  Description of Artificial Sequence: Synthetic oligonucleotide
aggacagatgaggacagatg

SEQ ID NO: 90 - DNA, 20 bp, Artificial Sequence
  Description of Artificial Sequence: Synthetic oligonucleotide
aggatcagataggatcagat

SEQ ID NO: 91 - DNA, 20 bp, Artificial Sequence
  Description of Artificial Sequence: Synthetic oligonucleotide
aggctgaaggaggctgaagg

SEQ ID NO: 92 - DNA, 20 bp, Artificial Sequence
  Description of Artificial Sequence: Synthetic oligonucleotide
aggtacgaggaggtacgagg

SEQ ID NO: 93 - DNA, 20 bp, Artificial Sequence
  Description of Artificial Sequence: Synthetic oligonucleotide
aggtaggctcaggtaggctc

SEQ ID NO: 94 - DNA, 20 bp, Artificial Sequence
  Description of Artificial Sequence: Synthetic oligonucleotide
aggtgaacggaggtgaacgg

SEQ ID NO: 95 - DNA, 20 bp, Artificial Sequence
  Description of Artificial Sequence: Synthetic oligonucleotide
aggtgccaataggtgccaat

SEQ ID NO: 96 - DNA, 20 bp, Artificial Sequence
  Description of Artificial Sequence: Synthetic oligonucleotide
aggttcaacgaggttcaacg

SEQ ID NO: 97 - DNA, 20 bp, Artificial Sequence
  Description of Artificial Sequence: Synthetic oligonucleotide
agtcactcgcagtcactcgc

SEQ ID NO: 98 - DNA, 20 bp, Artificial Sequence
  Description of Artificial Sequence: Synthetic oligonucleotide
agtcgtggtgagtcgtggtg

SEQ ID NO: 99 - DNA, 20 bp, Artificial Sequence
  Description of Artificial Sequence: Synthetic oligonucleotide
agtggaggagagtggaggag

SEQ ID NO: 100 - DNA, 20 bp, Artificial Sequence
  Description of Artificial Sequence: Synthetic oligonucleotide
agttgagcgcagttgagcgc

SEQ ID NO: 101 - DNA, 20 bp, Artificial Sequence
  Description of Artificial Sequence: Synthetic oligonucleotide
agttgatggtagttgatggt

SEQ ID NO: 102 - DNA, 20 bp, Artificial Sequence
  Description of Artificial Sequence: Synthetic oligonucleotide
ataacacagcataacacagc

SEQ ID NO: 103 - DNA, 20 bp, Artificial Sequence
  Description of Artificial Sequence: Synthetic oligonucleotide
ataaggtccgataaggtccg

SEQ ID NO: 104 - DNA, 20 bp, Artificial Sequence
  Description of Artificial Sequence: Synthetic oligonucleotide
atacagtcagatacagtcag

SEQ ID NO: 105 - DNA, 20 bp, Artificial Sequence
  Description of Artificial Sequence: Synthetic oligonucleotide
ataccggcctataccggcct

SEQ ID NO: 106 - DNA, 20 bp, Artificial Sequence
  Description of Artificial Sequence: Synthetic oligonucleotide
atagcaggatatagcaggat

SEQ ID NO: 107 - DNA, 20 bp, Artificial Sequence
  Description of Artificial Sequence: Synthetic oligonucleotide
atagcgttacatagcgttac

SEQ ID NO: 108 - DNA, 20 bp, Artificial Sequence
  Description of Artificial Sequence: Synthetic oligonucleotide
atagtccaacatagtccaac

SEQ ID NO: 109 - DNA, 20 bp, Artificial Sequence
  Description of Artificial Sequence: Synthetic oligonucleotide
atatcggcggatatcggcgg

SEQ ID NO: 110 - DNA, 20 bp, Artificial Sequence
  Description of Artificial Sequence: Synthetic oligonucleotide
atccgtgatgatccgtgatg

SEQ ID NO: 111 - DNA, 20 bp, Artificial Sequence
  Description of Artificial Sequence: Synthetic oligonucleotide
atcgtaccggatcgtaccgg

SEQ ID NO: 112 - DNA, 20 bp, Artificial Sequence
  Description of Artificial Sequence: Synthetic oligonucleotide
atcgttactgatcgttactg

SEQ ID NO: 113 - DNA, 20 bp, Artificial Sequence
  Description of Artificial Sequence: Synthetic oligonucleotide
atgaagatgcatgaagatgc

SEQ ID NO: 114 - DNA, 20 bp, Artificial Sequence
  Description of Artificial Sequence: Synthetic oligonucleotide
atggcgtggtatggcgtggt

SEQ ID NO: 115 - DNA, 20 bp, Artificial Sequence
  Description of Artificial Sequence: Synthetic oligonucleotide
atgttgagcgatgttgagcg

SEQ ID NO: 116 - DNA, 20 bp, Artificial Sequence
  Description of Artificial Sequence: Synthetic oligonucleotide
attagctgtcattagctgtc

SEQ ID NO: 117 - DNA, 20 bp, Artificial Sequence
  Description of Artificial Sequence: Synthetic oligonucleotide
attcgcgtgcattcgcgtgc

SEQ ID NO: 118 - DNA, 20 bp, Artificial Sequence
  Description of Artificial Sequence: Synthetic oligonucleotide
attgcgctccattgcgctcc

SEQ ID NO: 119 - DNA, 20 bp, Artificial Sequence
  Description of Artificial Sequence: Synthetic oligonucleotide
attgtgttgcattgtgttgc

SEQ ID NO: 120 - DNA, 20 bp, Artificial Sequence
  Description of Artificial Sequence: Synthetic oligonucleotide
caagacgaatcaagacgaat

SEQ ID NO: 121 - DNA, 20 bp, Artificial Sequence
  Description of Artificial Sequence: Synthetic oligonucleotide
cacgcactgtcacgcactgt

SEQ ID NO: 122 - DNA, 20 bp, Artificial Sequence
  Description of Artificial Sequence: Synthetic oligonucleotide
cacggagtagcacggagtag

SEQ ID NO: 123 - DNA, 20 bp, Artificial Sequence
  Description of Artificial Sequence: Synthetic oligonucleotide
cacggtatcgcacggtatcg

SEQ ID NO: 124 - DNA, 20 bp, Artificial Sequence
  Description of Artificial Sequence: Synthetic oligonucleotide
cactcggattcactcggatt

SEQ ID NO: 125 - DNA, 20 bp, Artificial Sequence
  Description of Artificial Sequence: Synthetic oligonucleotide
cacttgagtacacttgagta

SEQ ID NO: 126 - DNA, 20 bp, Artificial Sequence
  Description of Artificial Sequence: Synthetic oligonucleotide
cagcctcagtcagcctcagt

SEQ ID NO: 127 - DNA, 20 bp, Artificial Sequence
  Description of Artificial Sequence: Synthetic oligonucleotide
cagctccaagcagctccaag

SEQ ID NO: 128 - DNA, 20 bp, Artificial Sequence
  Description of Artificial Sequence: Synthetic oligonucleotide
catcgaggagcatcgaggag

SEQ ID NO: 129 - DNA, 20 bp, Artificial Sequence
  Description of Artificial Sequence: Synthetic oligonucleotide
cattggccgtcattggccgt

SEQ ID NO: 130 - DNA, 20 bp, Artificial Sequence
  Description of Artificial Sequence: Synthetic oligonucleotide
ccagaactggccagaactgg

SEQ ID NO: 131 - DNA, 20 bp, Artificial Sequence
  Description of Artificial Sequence: Synthetic oligonucleotide
ccagatacggccagatacgg

SEQ ID NO: 132 - DNA, 20 bp, Artificial Sequence
  Description of Artificial Sequence: Synthetic oligonucleotide
ccaggatccaccaggatcca

SEQ ID NO: 133 - DNA, 20 bp, Artificial Sequence
  Description of Artificial Sequence: Synthetic oligonucleotide
ccaggatgttccaggatgtt

SEQ ID NO: 134 - DNA, 20 bp, Artificial Sequence
  Description of Artificial Sequence: Synthetic oligonucleotide
ccgagcatgtccgagcatgt

SEQ ID NO: 135 - DNA, 20 bp, Artificial Sequence
  Description of Artificial Sequence: Synthetic oligonucleotide
ccggagtgttccggagtgtt

SEQ ID NO: 136 - DNA, 20 bp, Artificial Sequence
  Description of Artificial Sequence: Synthetic oligonucleotide
ccggtaccatccggtaccat

SEQ ID NO: 137 - DNA, 20 bp, Artificial Sequence
  Description of Artificial Sequence: Synthetic oligonucleotide
ccgtctaaggccgtctaagg

SEQ ID NO: 138 - DNA, 20 bp, Artificial Sequence
  Description of Artificial Sequence: Synthetic oligonucleotide
cctccattaacctccattaa

SEQ ID NO: 139 - DNA, 20 bp, Artificial Sequence
  Description of Artificial Sequence: Synthetic oligonucleotide
cctcctgactcctcctgact

SEQ ID NO: 140 - DNA, 20 bp, Artificial Sequence
  Description of Artificial Sequence: Synthetic oligonucleotide
cctctgctctcctctgctct

SEQ ID NO: 141 - DNA, 20 bp, Artificial Sequence
  Description of Artificial Sequence: Synthetic oligonucleotide
cctgccttgtcctgccttgt

SEQ ID NO: 142 - DNA, 20 bp, Artificial Sequence
  Description of Artificial Sequence: Synthetic oligonucleotide
cctggccattcctggccatt

SEQ ID NO: 143 - DNA, 20 bp, Artificial Sequence
  Description of Artificial Sequence: Synthetic oligonucleotide
ccttaacgcgccttaacgcg

SEQ ID NO: 144 - DNA, 20 bp, Artificial Sequence
  Description of Artificial Sequence: Synthetic oligonucleotide
cgacctgtctcgacctgtct

SEQ ID NO: 145 - DNA, 20 bp, Artificial Sequence
  Description of Artificial Sequence: Synthetic oligonucleotide
cgcgttacgtcgcgttacgt

SEQ ID NO: 146 - DNA, 20 bp, Artificial Sequence
  Description of Artificial Sequence: Synthetic oligonucleotide
cggcagttcacggcagttca

SEQ ID NO: 147 - DNA, 20 bp, Artificial Sequence
  Description of Artificial Sequence: Synthetic oligonucleotide
cggccattagcggccattag

SEQ ID NO: 148 - DNA, 20 bp, Artificial Sequence
  Description of Artificial Sequence: Synthetic oligonucleotide
cgtattgcatcgtattgcat

SEQ ID NO: 149 - DNA, 20 bp, Artificial Sequence
  Description of Artificial Sequence: Synthetic oligonucleotide
ctacgaccgtctacgaccgt

SEQ ID NO: 150 - DNA, 20 bp, Artificial Sequence
  Description of Artificial Sequence: Synthetic oligonucleotide
ctaggaaggtctaggaaggt

SEQ ID NO: 151 - DNA, 20 bp, Artificial Sequence
  Description of Artificial Sequence: Synthetic oligonucleotide
ctagtcctgtctagtcctgt

SEQ ID NO: 152 - DNA, 20 bp, Artificial Sequence
  Description of Artificial Sequence: Synthetic oligonucleotide
ctagtggaggctagtggagg

SEQ ID NO: 153 - DNA, 20 bp, Artificial Sequence
  Description of Artificial Sequence: Synthetic oligonucleotide
ctcgcagagtctcgcagagt

SEQ ID NO: 154 - DNA, 20 bp, Artificial Sequence
  Description of Artificial Sequence: Synthetic oligonucleotide
ctcgcttcgtctcgcttcgt

SEQ ID NO: 155 - DNA, 20 bp, Artificial Sequence
  Description of Artificial Sequence: Synthetic oligonucleotide
ctcgttagcgctcgttagcg

SEQ ID NO: 156 - DNA, 20 bp, Artificial Sequence
  Description of Artificial Sequence: Synthetic oligonucleotide
ctcttccaagctcttccaag

SEQ ID NO: 157 - DNA, 20 bp, Artificial Sequence
  Description of Artificial Sequence: Synthetic oligonucleotide
ctgcttcaatctgcttcaat

SEQ ID NO: 158 - DNA, 20 bp, Artificial Sequence
  Description of Artificial Sequence: Synthetic oligonucleotide
ctggtatcaactggtatcaa

SEQ ID NO: 159 - DNA, 20 bp, Artificial Sequence
  Description of Artificial Sequence: Synthetic oligonucleotide
ctgtcttcggctgtcttcgg

SEQ ID NO: 160 - DNA, 20 bp, Artificial Sequence
  Description of Artificial Sequence: Synthetic oligonucleotide
cttcatgacgcttcatgacg

SEQ ID NO: 161 - DNA, 20 bp, Artificial Sequence
  Description of Artificial Sequence: Synthetic oligonucleotide
cttcggcagtcttcggcagt

SEQ ID NO: 162 - DNA, 20 bp, Artificial Sequence
  Description of Artificial Sequence: Synthetic oligonucleotide
cttgaccggtcttgaccggt

SEQ ID NO: 163 - DNA, 20 bp, Artificial Sequence
  Description of Artificial Sequence: Synthetic oligonucleotide
cttgcctattcttgcctatt

SEQ ID NO: 164 - DNA, 20 bp, Artificial Sequence
  Description of Artificial Sequence: Synthetic oligonucleotide
gaacttgtgagaacttgtga

SEQ ID NO: 165 - DNA, 20 bp, Artificial Sequence
  Description of Artificial Sequence: Synthetic oligonucleotide
gaagcattctgaagcattct

SEQ ID NO: 166 - DNA, 20 bp, Artificial Sequence
  Description of Artificial Sequence: Synthetic oligonucleotide
gaatccattcgaatccattc

SEQ ID NO: 167 - DNA, 20 bp, Artificial Sequence
  Description of Artificial Sequence: Synthetic oligonucleotide
gacgcctgttgacgcctgtt

SEQ ID NO: 168 - DNA, 20 bp, Artificial Sequence
  Description of Artificial Sequence: Synthetic oligonucleotide
gacgtaggacgacgtaggac

SEQ ID NO: 169 - DNA, 20 bp, Artificial Sequence
  Description of Artificial Sequence: Synthetic oligonucleotide
gactaatggtgactaatggt

SEQ ID NO: 170 - DNA, 20 bp, Artificial Sequence
  Description of Artificial Sequence: Synthetic oligonucleotide
gagcctccttgagcctcctt

SEQ ID NO: 171 - DNA, 20 bp, Artificial Sequence
  Description of Artificial Sequence: Synthetic oligonucleotide
gagcgtctacgagcgtctac

SEQ ID NO: 172 - DNA, 20 bp, Artificial Sequence
  Description of Artificial Sequence: Synthetic oligonucleotide
gaggataggcgaggataggc

SEQ ID NO: 173 - DNA, 20 bp, Artificial Sequence
  Description of Artificial Sequence: Synthetic oligonucleotide
gagtgccatcgagtgccatc

SEQ ID NO: 174 - DNA, 20 bp, Artificial Sequence
  Description of Artificial Sequence: Synthetic oligonucleotide
gagtggatctgagtggatct

SEQ ID NO: 175 - DNA, 20 bp, Artificial Sequence
  Description of Artificial Sequence: Synthetic oligonucleotide
gagtggtagcgagtggtagc

SEQ ID NO: 176 - DNA, 20 bp, Artificial Sequence
  Description of Artificial Sequence: Synthetic oligonucleotide
gagttagagagagttagaga

SEQ ID NO: 177 - DNA, 20 bp, Artificial Sequence
  Description of Artificial Sequence: Synthetic oligonucleotide
gcacatctgcgcacatctgc

SEQ ID NO: 178 - DNA, 20 bp, Artificial Sequence
  Description of Artificial Sequence: Synthetic oligonucleotide
gcaccattacgcaccattac

SEQ ID NO: 179 - DNA, 20 bp, Artificial Sequence
  Description of Artificial Sequence: Synthetic oligonucleotide
gcagcctattgcagcctatt

SEQ ID NO: 180 - DNA, 20 bp, Artificial Sequence
  Description of Artificial Sequence: Synthetic oligonucleotide
gcagtatcaagcagtatcaa

SEQ ID NO: 181 - DNA, 20 bp, Artificial Sequence
  Description of Artificial Sequence: Synthetic oligonucleotide
gccgtcgttagccgtcgtta

SEQ ID NO: 182 - DNA, 20 bp, Artificial Sequence
  Description of Artificial Sequence: Synthetic oligonucleotide
gcctgagctagcctgagcta

SEQ ID NO: 183 - DNA, 20 bp, Artificial Sequence
  Description of Artificial Sequence: Synthetic oligonucleotide
gcgcaagcaagcgcaagcaa

SEQ ID NO: 184 - DNA, 20 bp, Artificial Sequence
  Description of Artificial Sequence: Synthetic oligonucleotide
gcgttacgacgcgttacgac

SEQ ID NO: 185 - DNA, 20 bp, Artificial Sequence
  Description of Artificial Sequence: Synthetic oligonucleotide
gcgttggatcgcgttggatc

SEQ ID NO: 186 - DNA, 20 bp, Artificial Sequence
  Description of Artificial Sequence: Synthetic oligonucleotide
gctagtcgcagctagtcgca

SEQ ID NO: 187 - DNA, 20 bp, Artificial Sequence
  Description of Artificial Sequence: Synthetic oligonucleotide
gctcactaccgctcactacc

SEQ ID NO: 188 - DNA, 20 bp, Artificial Sequence
  Description of Artificial Sequence: Synthetic oligonucleotide
gctcgaattagctcgaatta

SEQ ID NO: 189 - DNA, 20 bp, Artificial Sequence
  Description of Artificial Sequence: Synthetic oligonucleotide
gctcgattccgctcgattcc

SEQ ID NO: 190 - DNA, 20 bp, Artificial Sequence
  Description of Artificial Sequence: Synthetic oligonucleotide
gctgaggatcgctgaggatc

SEQ ID NO: 191 - DNA, 20 bp, Artificial Sequence
  Description of Artificial Sequence: Synthetic oligonucleotide
gcttcattctgcttcattct

SEQ ID NO: 192 - DNA, 20 bp, Artificial Sequence
  Description of Artificial Sequence: Synthetic oligonucleotide
gcttgctattgcttgctatt

SEQ ID NO: 193 - DNA, 20 bp, Artificial Sequence
  Description of Artificial Sequence: Synthetic oligonucleotide
gcttggttgcgcttggttgc

SEQ ID NO: 194 - DNA, 20 bp, Artificial Sequence
  Description of Artificial Sequence: Synthetic oligonucleotide
ggagtggttcggagtggttc

SEQ ID NO: 195 - DNA, 20 bp, Artificial Sequence
  Description of Artificial Sequence: Synthetic oligonucleotide
ggataataccggataatacc

SEQ ID NO: 196 - DNA, 20 bp, Artificial Sequence
  Description of Artificial Sequence: Synthetic oligonucleotide
ggatcgtggtggatcgtggt

SEQ ID NO: 197 - DNA, 20 bp, Artificial Sequence
  Description of Artificial Sequence: Synthetic oligonucleotide
ggatgattgtggatgattgt

SEQ ID NO: 198 - DNA, 20 bp, Artificial Sequence
  Description of Artificial Sequence: Synthetic oligonucleotide
ggatgcgttcggatgcgttc

SEQ ID NO: 199 - DNA, 20 bp, Artificial Sequence
  Description of Artificial Sequence: Synthetic oligonucleotide
ggcgaatgtcggcgaatgtc

SEQ ID NO: 200 - DNA, 20 bp, Artificial Sequence
  Description of Artificial Sequence: Synthetic oligonucleotide
ggcgattggtggcgattggt

SEQ ID NO: 201 - DNA, 20 bp, Artificial Sequence
  Description of Artificial Sequence: Synthetic oligonucleotide
ggcggtatcaggcggtatca

SEQ ID NO: 202 - DNA, 20 bp, Artificial Sequence
  Description of Artificial Sequence: Synthetic oligonucleotide
ggctatccacggctatccac

SEQ ID NO: 203 - DNA, 20 bp, Artificial Sequence
  Description of Artificial Sequence: Synthetic oligonucleotide
ggctattacaggctattaca

SEQ ID NO: 204 - DNA, 20 bp, Artificial Sequence
  Description of Artificial Sequence: Synthetic oligonucleotide
ggctgaactcggctgaactc

SEQ ID NO: 205 - DNA, 20 bp, Artificial Sequence
  Description of Artificial Sequence: Synthetic oligonucleotide
ggtacagtcaggtacagtca

SEQ ID NO: 206 - DNA, 20 bp, Artificial Sequence
  Description of Artificial Sequence: Synthetic oligonucleotide
ggtcgaacctggtcgaacct

SEQ ID NO: 207 - DNA, 20 bp, Artificial Sequence
  Description of Artificial Sequence: Synthetic oligonucleotide
ggtctctcgtggtctctcgt

SEQ ID NO: 208 - DNA, 20 bp, Artificial Sequence
  Description of Artificial Sequence: Synthetic oligonucleotide
ggtgcttgtcggtgcttgtc

SEQ ID NO: 209 - DNA, 20 bp, Artificial Sequence
  Description of Artificial Sequence: Synthetic oligonucleotide
ggttccacttggttccactt

SEQ ID NO: 210 - DNA, 20 bp, Artificial Sequence
  Description of Artificial Sequence: Synthetic oligonucleotide
ggttgcatccggttgcatcc

SEQ ID NO: 211 - DNA, 20 bp, Artificial Sequence
  Description of Artificial Sequence: Synthetic oligonucleotide
ggttggacgtggttggacgt

SEQ ID NO: 212 - DNA, 20 bp, Artificial Sequence
  Description of Artificial Sequence: Synthetic oligonucleotide
gtaagagcaagtaagagcaa

SEQ ID NO: 213 - DNA, 20 bp, Artificial Sequence
  Description of Artificial Sequence: Synthetic oligonucleotide
gtaaggcttagtaaggctta

SEQ ID NO: 214 - DNA, 20 bp, Artificial Sequence
  Description of Artificial Sequence: Synthetic oligonucleotide
gtagtcctcagtagtcctca

SEQ ID NO: 215 - DNA, 20 bp, Artificial Sequence
  Description of Artificial Sequence: Synthetic oligonucleotide
gtccggttctgtccggttct

SEQ ID NO: 216 - DNA, 20 bp, Artificial Sequence
  Description of Artificial Sequence: Synthetic oligonucleotide
gtcctacagcgtcctacagc

SEQ ID NO: 217 - DNA, 20 bp, Artificial Sequence
  Description of Artificial Sequence: Synthetic oligonucleotide
gtcggattaagtcggattaa

SEQ ID NO: 218 - DNA, 20 bp, Artificial Sequence
  Description of Artificial Sequence: Synthetic oligonucleotide
gtgaacagaagtgaacagaa

SEQ ID NO: 219 - DNA, 20 bp, Artificial Sequence
  Description of Artificial Sequence: Synthetic oligonucleotide
gtgcctacacgtgcctacac

SEQ ID NO: 220 - DNA, 20 bp, Artificial Sequence
  Description of Artificial Sequence: Synthetic oligonucleotide
gtgtatcggagtgtatcgga

SEQ ID NO: 221 - DNA, 20 bp, Artificial Sequence
  Description of Artificial Sequence: Synthetic oligonucleotide
gtgtccatgagtgtccatga

SEQ ID NO: 222 - DNA, 20 bp, Artificial Sequence
  Description of Artificial Sequence: Synthetic oligonucleotide
gtgtctaatcgtgtctaatc

SEQ ID NO: 223 - DNA, 20 bp, Artificial Sequence
  Description of Artificial Sequence: Synthetic oligonucleotide
gtgttcctgcgtgttcctgc

SEQ ID NO: 224 - DNA, 20 bp, Artificial Sequence
  Description of Artificial Sequence: Synthetic oligonucleotide
gtgttctgctgtgttctgct

SEQ ID NO: 225 - DNA, 20 bp, Artificial Sequence
  Description of Artificial Sequence: Synthetic oligonucleotide
gttaagaggagttaagagga

SEQ ID NO: 226 - DNA, 20 bp, Artificial Sequence
  Description of Artificial Sequence: Synthetic oligonucleotide
gttaatgcgtgttaatgcgt

SEQ ID NO: 227 - DNA, 20 bp, Artificial Sequence
  Description of Artificial Sequence: Synthetic oligonucleotide
gttaggctgtgttaggctgt

SEQ ID NO: 228 - DNA, 20 bp, Artificial Sequence
  Description of Artificial Sequence: Synthetic oligonucleotide
gttcattggagttcattgga

SEQ ID NO: 229 - DNA, 20 bp, Artificial Sequence
  Description of Artificial Sequence: Synthetic oligonucleotide
gttcggaccagttcggacca

SEQ ID NO: 230 - DNA, 20 bp, Artificial Sequence
  Description of Artificial Sequence: Synthetic oligonucleotide
gttggccagtgttggccagt

SEQ ID NO: 231 - DNA, 20 bp, Artificial Sequence
  Description of Artificial Sequence: Synthetic oligonucleotide
gttggtagttgttggtagtt

SEQ ID NO: 232 - DNA, 20 bp, Artificial Sequence
  Description of Artificial Sequence: Synthetic oligonucleotide
taacacgacataacacgaca

SEQ ID NO: 233 - DNA, 20 bp, Artificial Sequence
  Description of Artificial Sequence: Synthetic oligonucleotide
taagagagcataagagagca

SEQ ID NO: 234 - DNA, 20 bp, Artificial Sequence
  Description of Artificial Sequence: Synthetic oligonucleotide
taagaggcggtaagaggcgg

SEQ ID NO: 235 - DNA, 20 bp, Artificial Sequence
  Description of Artificial Sequence: Synthetic oligonucleotide
taaggaatggtaaggaatgg

SEQ ID NO: 236 - DNA, 20 bp, Artificial Sequence
  Description of Artificial Sequence: Synthetic oligonucleotide
taatgagcactaatgagcac

SEQ ID NO: 237 - DNA, 20 bp, Artificial Sequence
  Description of Artificial Sequence: Synthetic oligonucleotide
tacactggtctacactggtc

SEQ ID NO: 238 - DNA, 20 bp, Artificial Sequence
  Description of Artificial Sequence: Synthetic oligonucleotide
tacagcgcaatacagcgcaa

SEQ ID NO: 239 - DNA, 20 bp, Artificial Sequence
  Description of Artificial Sequence: Synthetic oligonucleotide
tacaggttagtacaggttag

SEQ ID NO: 240 - DNA, 20 bp, Artificial Sequence
  Description of Artificial Sequence: Synthetic oligonucleotide
tacattaccgtacattaccg

SEQ ID NO: 241 - DNA, 20 bp, Artificial Sequence
  Description of Artificial Sequence: Synthetic oligonucleotide
taccaatctctaccaatctc

SEQ ID NO: 242 - DNA, 20 bp, Artificial Sequence
  Description of Artificial Sequence: Synthetic oligonucleotide
taccggagagtaccggagag

SEQ ID NO: 243 - DNA, 20 bp, Artificial Sequence
  Description of Artificial Sequence: Synthetic oligonucleotide
taccggcttctaccggcttc

SEQ ID NO: 244 - DNA, 20 bp, Artificial Sequence
  Description of Artificial Sequence: Synthetic oligonucleotide
tacctacatgtacctacatg

SEQ ID NO: 245 - DNA, 20 bp, Artificial Sequence
  Description of Artificial Sequence: Synthetic oligonucleotide
tacgattacgtacgattacg

SEQ ID NO: 246 - DNA, 20 bp, Artificial Sequence
  Description of Artificial Sequence: Synthetic oligonucleotide
tacgcagaggtacgcagagg

SEQ ID NO: 247 - DNA, 20 bp, Artificial Sequence
  Description of Artificial Sequence: Synthetic oligonucleotide
tactcaacgatactcaacga

SEQ ID NO: 248 - DNA, 20 bp, Artificial Sequence
  Description of Artificial Sequence: Synthetic oligonucleotide
tagaccaacctagaccaacc

SEQ ID NO: 249 - DNA, 20 bp, Artificial Sequence
  Description of Artificial Sequence: Synthetic oligonucleotide
tagacctccgtagacctccg

SEQ ID NO: 250 - DNA, 20 bp, Artificial Sequence
  Description of Artificial Sequence: Synthetic oligonucleotide
tagcagttgatagcagttga

SEQ ID NO: 251 - DNA, 20 bp, Artificial Sequence
  Description of Artificial Sequence: Synthetic oligonucleotide
tagcgcaagctagcgcaagc

SEQ ID NO: 252 - DNA, 20 bp, Artificial Sequence
  Description of Artificial Sequence: Synthetic oligonucleotide
tagctatacctagctatacc

SEQ ID NO: 253 - DNA, 20 bp, Artificial Sequence
  Description of Artificial Sequence: Synthetic oligonucleotide
tagcttgcgctagcttgcgc

SEQ ID NO: 254 - DNA, 20 bp, Artificial Sequence
  Description of Artificial Sequence: Synthetic oligonucleotide
taggaatccataggaatcca

SEQ ID NO: 255 - DNA, 20 bp, Artificial Sequence
  Description of Artificial Sequence: Synthetic oligonucleotide
taggccgttctaggccgttc

SEQ ID NO: 256 - DNA, 20 bp, Artificial Sequence
  Description of Artificial Sequence: Synthetic oligonucleotide
taggtcactataggtcacta

SEQ ID NO: 257 - DNA, 20 bp, Artificial Sequence
  Description of Artificial Sequence: Synthetic oligonucleotide
tagtcgcgtctagtcgcgtc

SEQ ID NO: 258 - DNA, 20 bp, Artificial Sequence
  Description of Artificial Sequence: Synthetic oligonucleotide
tatacggctatatacggcta

SEQ ID NO: 259 - DNA, 20 bp, Artificial Sequence
  Description of Artificial Sequence: Synthetic oligonucleotide
tatcgcggcatatcgcggca

SEQ ID NO: 260 - DNA, 20 bp, Artificial Sequence
  Description of Artificial Sequence: Synthetic oligonucleotide
tatggagcaatatggagcaa

SEQ ID NO: 261 - DNA, 20 bp, Artificial Sequence
  Description of Artificial Sequence: Synthetic oligonucleotide
tatggcgtggtatggcgtgg

SEQ ID NO: 262 - DNA, 20 bp, Artificial Sequence
  Description of Artificial Sequence: Synthetic oligonucleotide
tatgttcaggtatgttcagg

SEQ ID NO: 263 - DNA, 20 bp, Artificial Sequence
  Description of Artificial Sequence: Synthetic oligonucleotide
tattcctgtctattcctgtc

SEQ ID NO: 264 - DNA, 20 bp, Artificial Sequence
  Description of Artificial Sequence: Synthetic oligonucleotide
tcaagagatctcaagagatc

SEQ ID NO: 265 - DNA, 20 bp, Artificial Sequence
  Description of Artificial Sequence: Synthetic oligonucleotide
tcactaccaatcactaccaa

SEQ ID NO: 266 - DNA, 20 bp, Artificial Sequence
  Description of Artificial Sequence: Synthetic oligonucleotide
tcagtctgcgtcagtctgcg

SEQ ID NO: 267 - DNA, 20 bp, Artificial Sequence
  Description of Artificial Sequence: Synthetic oligonucleotide
tcagttaagctcagttaagc

SEQ ID NO: 268 - DNA, 20 bp, Artificial Sequence
  Description of Artificial Sequence: Synthetic oligonucleotide
tccagagtggtccagagtgg

SEQ ID NO: 269 - DNA, 20 bp, Artificial Sequence
  Description of Artificial Sequence: Synthetic oligonucleotide
tccagtcgtctccagtcgtc

SEQ ID NO: 270 - DNA, 20 bp, Artificial Sequence
  Description of Artificial Sequence: Synthetic oligonucleotide
tccgacgttgtccgacgttg

SEQ ID NO: 271 - DNA, 20 bp, Artificial Sequence
  Description of Artificial Sequence: Synthetic oligonucleotide
tcctaccgactcctaccgac

SEQ ID NO: 272 - DNA, 20 bp, Artificial Sequence
  Description of Artificial Sequence: Synthetic oligonucleotide
tccttcctcctccttcctcc

SEQ ID NO: 273 - DNA, 20 bp, Artificial Sequence
  Description of Artificial Sequence: Synthetic oligonucleotide
tcgagagccatcgagagcca

SEQ ID NO: 274 - DNA, 20 bp, Artificial Sequence
  Description of Artificial Sequence: Synthetic oligonucleotide
tcgcacagactcgcacagac

SEQ ID NO: 275 - DNA, 20 bp, Artificial Sequence
  Description of Artificial Sequence: Synthetic oligonucleotide
tcgccgttagtcgccgttag

SEQ ID NO: 276 - DNA, 20 bp, Artificial Sequence
  Description of Artificial Sequence: Synthetic oligonucleotide
tcggcacaactcggcacaac

SEQ ID NO: 277 - DNA, 20 bp, Artificial Sequence
  Description of Artificial Sequence: Synthetic oligonucleotide
tcggcagttgtcggcagttg

SEQ ID NO: 278 - DNA, 20 bp, Artificial Sequence
  Description of Artificial Sequence: Synthetic oligonucleotide
tcggtcacactcggtcacac

SEQ ID NO: 279 - DNA, 20 bp, Artificial Sequence
  Description of Artificial Sequence: Synthetic oligonucleotide
tcgtgctagctcgtgctagc

SEQ ID NO: 280 - DNA, 20 bp, Artificial Sequence
  Description of Artificial Sequence: Synthetic oligonucleotide
tctagcctaatctagcctaa

SEQ ID NO: 281 - DNA, 20 bp, Artificial Sequence
  Description of Artificial Sequence: Synthetic oligonucleotide
tctcactgcgtctcactgcg

SEQ ID NO: 282 - DNA, 20 bp, Artificial Sequence
  Description of Artificial Sequence: Synthetic oligonucleotide
tctccggcaatctccggcaa

SEQ ID NO: 283 - DNA, 20 bp, Artificial Sequence
  Description of Artificial Sequence: Synthetic oligonucleotide
tctcgctctctctcgctctc

SEQ ID NO: 284 - DNA, 20 bp, Artificial Sequence
  Description of Artificial Sequence: Synthetic oligonucleotide
tctgtcgcaatctgtcgcaa

SEQ ID NO: 285 - DNA, 20 bp, Artificial Sequence
  Description of Artificial Sequence: Synthetic oligonucleotide
tcttaacctctcttaacctc

SEQ ID NO: 286 - DNA, 20 bp, Artificial Sequence
  Description of Artificial Sequence: Synthetic oligonucleotide
tgacacatgatgacacatga

SEQ ID NO: 287 - DNA, 20 bp, Artificial Sequence
  Description of Artificial Sequence: Synthetic oligonucleotide
tgagagtgaatgagagtgaa

SEQ ID NO: 288 - DNA, 20 bp, Artificial Sequence
  Description of Artificial Sequence: Synthetic oligonucleotide
tgagtggctgtgagtggctg

SEQ ID NO: 289 - DNA, 20 bp, Artificial Sequence
  Description of Artificial Sequence: Synthetic oligonucleotide
tgattgaccatgattgacca

SEQ ID NO: 290 - DNA, 20 bp, Artificial Sequence
  Description of Artificial Sequence: Synthetic oligonucleotide
tgcagtcgcatgcagtcgca

SEQ ID NO: 291 - DNA, 20 bp, Artificial Sequence
  Description of Artificial Sequence: Synthetic oligonucleotide
tgccatgaggtgccatgagg

SEQ ID NO: 292 - DNA, 20 bp, Artificial Sequence
  Description of Artificial Sequence: Synthetic oligonucleotide
tgcctaacgctgcctaacgc

SEQ ID NO: 293 - DNA, 20 bp, Artificial Sequence
  Description of Artificial Sequence: Synthetic oligonucleotide
tgcctataactgcctataac

SEQ ID NO: 294 - DNA, 20 bp, Artificial Sequence
  Description of Artificial Sequence: Synthetic oligonucleotide
tgcgagagagtgcgagagag

SEQ ID NO: 295 - DNA, 20 bp, Artificial Sequence
  Description of Artificial Sequence: Synthetic oligonucleotide
tgcgcgatcatgcgcgatca

SEQ ID NO: 296 - DNA, 20 bp, Artificial Sequence
  Description of Artificial Sequence: Synthetic oligonucleotide
tgcggagtgatgcggagtga

SEQ ID NO: 297 - DNA, 20 bp, Artificial Sequence
  Description of Artificial Sequence: Synthetic oligonucleotide
tgcggattcctgcggattcc

SEQ ID NO: 298 - DNA, 20 bp, Artificial Sequence
  Description of Artificial Sequence: Synthetic oligonucleotide
tgcggctacatgcggctaca

SEQ ID NO: 299 - DNA, 20 bp, Artificial Sequence
  Description of Artificial Sequence: Synthetic oligonucleotide
tgcgtaacaatgcgtaacaa

SEQ ID NO: 300 - DNA, 20 bp, Artificial Sequence
  Description of Artificial Sequence: Synthetic oligonucleotide
tgcgtcctcatgcgtcctca

SEQ ID NO: 301 - DNA, 20 bp, Artificial Sequence
  Description of Artificial Sequence: Synthetic oligonucleotide
tgcgttcagctgcgttcagc

SEQ ID NO: 302 - DNA, 20 bp, Artificial Sequence
  Description of Artificial Sequence: Synthetic oligonucleotide
tgcttcagcgtgcttcagcg

SEQ ID NO: 303 - DNA, 20 bp, Artificial Sequence
  Description of Artificial Sequence: Synthetic oligonucleotide
tgcttgcctctgcttgcctc

SEQ ID NO: 304 - DNA, 20 bp, Artificial Sequence
  Description of Artificial Sequence: Synthetic oligonucleotide
tggaactggctggaactggc

SEQ ID NO: 305 - DNA, 20 bp, Artificial Sequence
  Description of Artificial Sequence: Synthetic oligonucleotide
tgtattggagtgtattggag

SEQ ID NO: 306 - DNA, 20 bp, Artificial Sequence
  Description of Artificial Sequence: Synthetic oligonucleotide
tgtggaacggtgtggaacgg

SEQ ID NO: 307 - DNA, 20 bp, Artificial Sequence
  Description of Artificial Sequence: Synthetic oligonucleotide
tgtggagtcgtgtggagtcg

SEQ ID NO: 308 - DNA, 20 bp, Artificial Sequence
  Description of Artificial Sequence: Synthetic oligonucleotide
tgtgtggccatgtgtggcca

SEQ ID NO: 309 - DNA, 20 bp, Artificial Sequence
  Description of Artificial Sequence: Synthetic oligonucleotide
tgttaagaggtgttaagagg

SEQ ID NO: 310 - DNA, 20 bp, Artificial Sequence
  Description of Artificial Sequence: Synthetic oligonucleotide
tgttactcactgttactcac

SEQ ID NO: 311 - DNA, 20 bp, Artificial Sequence
  Description of Artificial Sequence: Synthetic oligonucleotide
tgttcgcagctgttcgcagc

SEQ ID NO: 312 - DNA, 20 bp, Artificial Sequence
  Description of Artificial Sequence: Synthetic oligonucleotide
tgttggcatatgttggcata

SEQ ID NO: 313 - DNA, 20 bp, Artificial Sequence
  Description of Artificial Sequence: Synthetic oligonucleotide
ttaagtgcagttaagtgcag

SEQ ID NO: 314 - DNA, 20 bp, Artificial Sequence
  Description of Artificial Sequence: Synthetic oligonucleotide
ttagagatccttagagatcc

SEQ ID NO: 315 - DNA, 20 bp, Artificial Sequence
  Description of Artificial Sequence: Synthetic oligonucleotide
ttaggtcagattaggtcaga

SEQ ID NO: 316 - DNA, 20 bp, Artificial Sequence
  Description of Artificial Sequence: Synthetic oligonucleotide
ttatctcctgttatctcctg

SEQ ID NO: 317 - DNA, 20 bp, Artificial Sequence
  Description of Artificial Sequence: Synthetic oligonucleotide
ttcagtgtcgttcagtgtcg

SEQ ID NO: 318 - DNA, 20 bp, Artificial Sequence
  Description of Artificial Sequence: Synthetic oligonucleotide
ttccaagaagttccaagaag

SEQ ID NO: 319 - DNA, 20 bp, Artificial Sequence
  Description of Artificial Sequence: Synthetic oligonucleotide
ttccaccgcattccaccgca

SEQ ID NO: 320 - DNA, 20 bp, Artificial Sequence
  Description of Artificial Sequence: Synthetic oligonucleotide
ttccactatcttccactatc

SEQ ID NO: 321 - DNA, 20 bp, Artificial Sequence
  Description of Artificial Sequence: Synthetic oligonucleotide
ttccacttgattccacttga

SEQ ID NO: 322 - DNA, 20 bp, Artificial Sequence
  Description of Artificial Sequence: Synthetic oligonucleotide
ttccgagagcttccgagagc

SEQ ID NO: 323 - DNA, 20 bp, Artificial Sequence
  Description of Artificial Sequence: Synthetic oligonucleotide
ttcctgagccttcctgagcc

SEQ ID NO: 324 - DNA, 20 bp, Artificial Sequence
  Description of Artificial Sequence: Synthetic oligonucleotide
ttcgagtcgcttcgagtcgc

SEQ ID NO: 325 - DNA, 20 bp, Artificial Sequence
  Description of Artificial Sequence: Synthetic oligonucleotide
ttcgtgccagttcgtgccag

SEQ ID NO: 326 - DNA, 20 bp, Artificial Sequence
  Description of Artificial Sequence: Synthetic oligonucleotide
ttctacaccattctacacca

SEQ ID NO: 327 - DNA, 20 bp, Artificial Sequence
  Description of Artificial Sequence: Synthetic oligonucleotide
ttctcgctccttctcgctcc

SEQ ID NO: 328 - DNA, 20 bp, Artificial Sequence
  Description of Artificial Sequence: Synthetic oligonucleotide
ttctggccacttctggccac

SEQ ID NO: 329 - DNA, 20 bp, Artificial Sequence
  Description of Artificial Sequence: Synthetic oligonucleotide
ttgaatggtgttgaatggtg

SEQ ID NO: 330 - DNA, 20 bp, Artificial Sequence
  Description of Artificial Sequence: Synthetic oligonucleotide
ttgagccgacttgagccgac

SEQ ID NO: 331 - DNA, 20 bp, Artificial Sequence
  Description of Artificial Sequence: Synthetic oligonucleotide
ttgcgccaagttgcgccaag

SEQ ID NO: 332 - DNA, 20 bp, Artificial Sequence
  Description of Artificial Sequence: Synthetic oligonucleotide
ttgctcttagttgctcttag

SEQ ID NO: 333 - DNA, 20 bp, Artificial Sequence
  Description of Artificial Sequence: Synthetic oligonucleotide
ttggcaaggcttggcaaggc

SEQ ID NO: 334 - DNA, 20 bp, Artificial Sequence
  Description of Artificial Sequence: Synthetic oligonucleotide
ttggctcacgttggctcacg

SEQ ID NO: 335 - DNA, 20 bp, Artificial Sequence
  Description of Artificial Sequence: Synthetic oligonucleotide
ttggcttccattggcttcca

SEQ ID NO: 336 - DNA, 20 bp, Artificial Sequence
  Description of Artificial Sequence: Synthetic oligonucleotide
ttgtggatacttgtggatac

SEQ ID NO: 337 - DNA, 20 bp, Artificial Sequence
  Description of Artificial Sequence: Synthetic oligonucleotide
aacacggatgaacacggatg

SEQ ID NO: 338 - DNA, 20 bp, Artificial Sequence
  Description of Artificial Sequence: Synthetic oligonucleotide
aacagaccggaacagaccgg

SEQ ID NO: 339 - DNA, 20 bp, Artificial Sequence
  Description of Artificial Sequence: Synthetic oligonucleotide
aacagtgatcaacagtgatc

SEQ ID NO: 340 - DNA, 20 bp, Artificial Sequence
  Description of Artificial Sequence: Synthetic oligonucleotide
aaccatcttgaaccatcttg

SEQ ID NO: 341 - DNA, 20 bp, Artificial Sequence
  Description of Artificial Sequence: Synthetic oligonucleotide
aacggtgacgaacggtgacg

SEQ ID NO: 342 - DNA, 20 bp, Artificial Sequence
  Description of Artificial Sequence: Synthetic oligonucleotide
aactacgcggaactacgcgg

SEQ ID NO: 343 - DNA, 20 bp, Artificial Sequence
  Description of Artificial Sequence: Synthetic oligonucleotide
aactaggcttaactaggctt

SEQ ID NO: 344 - DNA, 20 bp, Artificial Sequence
  Description of Artificial Sequence: Synthetic oligonucleotide
aactggcgtgaactggcgtg

SEQ ID NO: 345 - DNA, 20 bp, Artificial Sequence
  Description of Artificial Sequence: Synthetic oligonucleotide
aagacaggataagacaggat

SEQ ID NO: 346 - DNA, 20 bp, Artificial Sequence
  Description of Artificial Sequence: Synthetic oligonucleotide
aagagccagtaagagccagt

SEQ ID NO: 347 - DNA, 20 bp, Artificial Sequence
  Description of Artificial Sequence: Synthetic oligonucleotide
aagagtatcgaagagtatcg

SEQ ID NO: 348 - DNA, 20 bp, Artificial Sequence
  Description of Artificial Sequence: Synthetic oligonucleotide
aaggaacactaaggaacact

SEQ ID NO: 349 - DNA, 20 bp, Artificial Sequence
  Description of Artificial Sequence: Synthetic oligonucleotide
aagtcgcaggaagtcgcagg

SEQ ID NO: 350 - DNA, 20 bp, Artificial Sequence
  Description of Artificial Sequence: Synthetic oligonucleotide
aatcacagtcaatcacagtc

SEQ ID NO: 351 - DNA, 20 bp, Artificial Sequence
  Description of Artificial Sequence: Synthetic oligonucleotide
aatcgccattaatcgccatt

SEQ ID NO: 352 - DNA, 20 bp, Artificial Sequence
  Description of Artificial Sequence: Synthetic oligonucleotide
aattgcggccaattgcggcc

SEQ ID NO: 353 - DNA, 20 bp, Artificial Sequence
  Description of Artificial Sequence: Synthetic oligonucleotide
acaactcgcgacaactcgcg

SEQ ID NO: 354 - DNA, 20 bp, Artificial Sequence
  Description of Artificial Sequence: Synthetic oligonucleotide
acaagctgcgacaagctgcg

SEQ ID NO: 355 - DNA, 20 bp, Artificial Sequence
  Description of Artificial Sequence: Synthetic oligonucleotide
acaccaattcacaccaattc

SEQ ID NO: 356 - DNA, 20 bp, Artificial Sequence
  Description of Artificial Sequence: Synthetic oligonucleotide
acacgaaggtacacgaaggt

SEQ ID NO: 357 - DNA, 20 bp, Artificial Sequence
  Description of Artificial Sequence: Synthetic oligonucleotide
acagaatgtgacagaatgtg

SEQ ID NO: 358 - DNA, 20 bp, Artificial Sequence
  Description of Artificial Sequence: Synthetic oligonucleotide
acatagtggtacatagtggt

SEQ ID NO: 359 - DNA, 20 bp, Artificial Sequence
  Description of Artificial Sequence: Synthetic oligonucleotide
accaccacgtaccaccacgt

SEQ ID NO: 360 - DNA, 20 bp, Artificial Sequence
  Description of Artificial Sequence: Synthetic oligonucleotide
accgacagctaccgacagct

SEQ ID NO: 361 - DNA, 20 bp, Artificial Sequence
  Description of Artificial Sequence: Synthetic oligonucleotide
accggctagtaccggctagt

SEQ ID NO: 362 - DNA, 20 bp, Artificial Sequence
  Description of Artificial Sequence: Synthetic oligonucleotide
accgtagattaccgtagatt

SEQ ID NO: 363 - DNA, 20 bp, Artificial Sequence
  Description of Artificial Sequence: Synthetic oligonucleotide
accgtgacttaccgtgactt

SEQ ID NO: 364 - DNA, 20 bp, Artificial Sequence
  Description of Artificial Sequence: Synthetic oligonucleotide
acctcacaacacctcacaac

SEQ ID NO: 365 - DNA, 20 bp, Artificial Sequence
  Description of Artificial Sequence: Synthetic oligonucleotide
accttgtcctaccttgtcct

SEQ ID NO: 366 - DNA, 20 bp, Artificial Sequence
  Description of Artificial Sequence: Synthetic oligonucleotide
acgaagcaggacgaagcagg

SEQ ID NO: 367 - DNA, 20 bp, Artificial Sequence
  Description of Artificial Sequence: Synthetic oligonucleotide
acgactggacacgactggac

SEQ ID NO: 368 - DNA, 20 bp, Artificial Sequence
  Description of Artificial Sequence: Synthetic oligonucleotide
acgagagcagacgagagcag

SEQ ID NO: 369 - DNA, 20 bp, Artificial Sequence
  Description of Artificial Sequence: Synthetic oligonucleotide
acgcctgttgacgcctgttg

SEQ ID NO: 370 - DNA, 20 bp, Artificial Sequence
  Description of Artificial Sequence: Synthetic oligonucleotide
acgcgacttcacgcgacttc

SEQ ID NO: 371 - DNA, 20 bp, Artificial Sequence
  Description of Artificial Sequence: Synthetic oligonucleotide
acggattgatacggattgat

SEQ ID NO: 372 - DNA, 20 bp, Artificial Sequence
  Description of Artificial Sequence: Synthetic oligonucleotide
acggctcatgacggctcatg

SEQ ID NO: 373 - DNA, 20 bp, Artificial Sequence
  Description of Artificial Sequence: Synthetic oligonucleotide
acggtaagatacggtaagat

SEQ ID NO: 374 - DNA, 20 bp, Artificial Sequence
  Description of Artificial Sequence: Synthetic oligonucleotide
acggtagcacacggtagcac

SEQ ID NO: 375 - DNA, 20 bp, Artificial Sequence
  Description of Artificial Sequence: Synthetic oligonucleotide
acggtgttcgacggtgttcg

SEQ ID NO: 376 - DNA, 20 bp, Artificial Sequence
  Description of Artificial Sequence: Synthetic oligonucleotide
acgtcgatggacgtcgatgg

SEQ ID NO: 377 - DNA, 20 bp, Artificial Sequence
  Description of Artificial Sequence: Synthetic oligonucleotide
acgtgcagacacgtgcagac

SEQ ID NO: 378 - DNA, 20 bp, Artificial Sequence
  Description of Artificial Sequence: Synthetic oligonucleotide
acgttccagcacgttccagc

SEQ ID NO: 379 - DNA, 20 bp, Artificial Sequence
  Description of Artificial Sequence: Synthetic oligonucleotide
actagcttgtactagcttgt

SEQ ID NO: 380 - DNA, 20 bp, Artificial Sequence
  Description of Artificial Sequence: Synthetic oligonucleotide
actaggacgcactaggacgc

SEQ ID NO: 381 - DNA, 20 bp, Artificial Sequence
  Description of Artificial Sequence: Synthetic oligonucleotide
actcacctggactcacctgg

SEQ ID NO: 382 - DNA, 20 bp, Artificial Sequence
  Description of Artificial Sequence: Synthetic oligonucleotide
actcatatcgactcatatcg

SEQ ID NO: 383 - DNA, 20 bp, Artificial Sequence
  Description of Artificial Sequence: Synthetic oligonucleotide
actgaccgtgactgaccgtg

SEQ ID NO: 384 - DNA, 20 bp, Artificial Sequence
  Description of Artificial Sequence: Synthetic oligonucleotide
acttctaaccacttctaacc

SEQ ID NO: 385 - DNA, 20 bp, Artificial Sequence
  Description of Artificial Sequence: Synthetic oligonucleotide
acttggcgctacttggcgct

SEQ ID NO: 386 - DNA, 20 bp, Artificial Sequence
  Description of Artificial Sequence: Synthetic oligonucleotide
agaacgctccagaacgctcc

SEQ ID NO: 387 - DNA, 20 bp, Artificial Sequence
  Description of Artificial Sequence: Synthetic oligonucleotide
agaacttaggagaacttagg

SEQ ID NO: 388 - DNA, 20 bp, Artificial Sequence
  Description of Artificial Sequence: Synthetic oligonucleotide
agaagcgcatagaagcgcat

SEQ ID NO: 389 - DNA, 20 bp, Artificial Sequence
  Description of Artificial Sequence: Synthetic oligonucleotide
agacaatagcagacaatagc

SEQ ID NO: 390 - DNA, 20 bp, Artificial Sequence
  Description of Artificial Sequence: Synthetic oligonucleotide
agaccgagacagaccgagac

SEQ ID NO: 391 - DNA, 20 bp, Artificial Sequence
  Description of Artificial Sequence: Synthetic oligonucleotide
agacgctgtcagacgctgtc

SEQ ID NO: 392 - DNA, 20 bp, Artificial Sequence
  Description of Artificial Sequence: Synthetic oligonucleotide
agacgtagcgagacgtagcg

SEQ ID NO: 393 - DNA, 20 bp, Artificial Sequence
  Description of Artificial Sequence: Synthetic oligonucleotide
agagagctctagagagctct

SEQ ID NO: 394 - DNA, 20 bp, Artificial Sequence
  Description of Artificial Sequence: Synthetic oligonucleotide
agaggccactagaggccact

SEQ ID NO: 395 - DNA, 20 bp, Artificial Sequence
  Description of Artificial Sequence: Synthetic oligonucleotide
agattgccgcagattgccgc

SEQ ID NO: 396 - DNA, 20 bp, Artificial Sequence
  Description of Artificial Sequence: Synthetic oligonucleotide
agcacgatgcagcacgatgc

SEQ ID NO: 397 - DNA, 20 bp, Artificial Sequence
  Description of Artificial Sequence: Synthetic oligonucleotide
agcagagaatagcagagaat

SEQ ID NO: 398 - DNA, 20 bp, Artificial Sequence
  Description of Artificial Sequence: Synthetic oligonucleotide
agccacaaggagccacaagg

SEQ ID NO: 399 - DNA, 20 bp, Artificial Sequence
  Description of Artificial Sequence: Synthetic oligonucleotide
agccaggaagagccaggaag

SEQ ID NO: 400 - DNA, 20 bp, Artificial Sequence
  Description of Artificial Sequence: Synthetic oligonucleotide
agctctggagagctctggag

SEQ ID NO: 401 - DNA, 20 bp, Artificial Sequence
  Description of Artificial Sequence: Synthetic oligonucleotide
agcttggcagagcttggcag

SEQ ID NO: 402 - DNA, 20 bp, Artificial Sequence
  Description of Artificial Sequence: Synthetic oligonucleotide
aggaataacgaggaataacg

SEQ ID NO: 403 - DNA, 20 bp, Artificial Sequence
  Description of Artificial Sequence: Synthetic oligonucleotide
aggaattgacaggaattgac

SEQ ID NO: 404 - DNA, 20 bp, Artificial Sequence
  Description of Artificial Sequence: Synthetic oligonucleotide
aggaggaattaggaggaatt

SEQ ID NO: 405 - DNA, 20 bp, Artificial Sequence
  Description of Artificial Sequence: Synthetic oligonucleotide
aggataggccaggataggcc

SEQ ID NO: 406 - DNA, 20 bp, Artificial Sequence
  Description of Artificial Sequence: Synthetic oligonucleotide
aggtggccttaggtggcctt

SEQ ID NO: 407 - DNA, 20 bp, Artificial Sequence
  Description of Artificial Sequence: Synthetic oligonucleotide
aggtgttgcgaggtgttgcg

SEQ ID NO: 408 - DNA, 20 bp, Artificial Sequence
  Description of Artificial Sequence: Synthetic oligonucleotide
aggttaggtgaggttaggtg

SEQ ID NO: 409 - DNA, 20 bp, Artificial Sequence
  Description of Artificial Sequence: Synthetic oligonucleotide
agtccgtcctagtccgtcct

SEQ ID NO: 410 - DNA, 20 bp, Artificial Sequence
  Description of Artificial Sequence: Synthetic oligonucleotide
agtcgatccgagtcgatccg

SEQ ID NO: 411 - DNA, 20 bp, Artificial Sequence
  Description of Artificial Sequence: Synthetic oligonucleotide
agtcgctgctagtcgctgct

SEQ ID NO: 412 - DNA, 20 bp, Artificial Sequence
  Description of Artificial Sequence: Synthetic oligonucleotide
agtcgtcctcagtcgtcctc

SEQ ID NO: 413 - DNA, 20 bp, Artificial Sequence
  Description of Artificial Sequence: Synthetic oligonucleotide
agtgttccgtagtgttccgt

SEQ ID NO: 414 - DNA, 20 bp, Artificial Sequence
  Description of Artificial Sequence: Synthetic oligonucleotide
agttgctcatagttgctcat

SEQ ID NO: 415 - DNA, 20 bp, Artificial Sequence
  Description of Artificial Sequence: Synthetic oligonucleotide
ataacgtgagataacgtgag

SEQ ID NO: 416 - DNA, 20 bp, Artificial Sequence
  Description of Artificial Sequence: Synthetic oligonucleotide
atacgcaggcatacgcaggc

SEQ ID NO: 417 - DNA, 20 bp, Artificial Sequence
  Description of Artificial Sequence: Synthetic oligonucleotide
atactgatgcatactgatgc

SEQ ID NO: 418 - DNA, 20 bp, Artificial Sequence
  Description of Artificial Sequence: Synthetic oligonucleotide
atagttcgtcatagttcgtc

SEQ ID NO: 419 - DNA, 20 bp, Artificial Sequence
  Description of Artificial Sequence: Synthetic oligonucleotide
atatcttcgcatatcttcgc

SEQ ID NO: 420 - DNA, 20 bp, Artificial Sequence
  Description of Artificial Sequence: Synthetic oligonucleotide
atatgccttcatatgccttc

SEQ ID NO: 421 - DNA, 20 bp, Artificial Sequence
  Description of Artificial Sequence: Synthetic oligonucleotide
atcagatcacatcagatcac

SEQ ID NO: 422 - DNA, 20 bp, Artificial Sequence
  Description of Artificial Sequence: Synthetic oligonucleotide
atccaatctgatccaatctg

SEQ ID NO: 423 - DNA, 20 bp, Artificial Sequence
  Description of Artificial Sequence: Synthetic oligonucleotide
atccacagcgatccacagcg

SEQ ID NO: 424 - DNA, 20 bp, Artificial Sequence
  Description of Artificial Sequence: Synthetic oligonucleotide
atccggaacgatccggaacg

SEQ ID NO: 425 - DNA, 20 bp, Artificial Sequence
  Description of Artificial Sequence: Synthetic oligonucleotide
atcggcttccatcggcttcc

SEQ ID NO: 426 - DNA, 20 bp, Artificial Sequence
  Description of Artificial Sequence: Synthetic oligonucleotide
atcgtcggagatcgtcggag

SEQ ID NO: 427 - DNA, 20 bp, Artificial Sequence
  Description of Artificial Sequence: Synthetic oligonucleotide
atctctcacgatctctcacg

SEQ ID NO: 428 - DNA, 20 bp, Artificial Sequence
  Description of Artificial Sequence: Synthetic oligonucleotide
atgcacctgcatgcacctgc

SEQ ID NO: 429 - DNA, 20 bp, Artificial Sequence
  Description of Artificial Sequence: Synthetic oligonucleotide
atgcagtcgcatgcagtcgc

SEQ ID NO: 430 - DNA, 20 bp, Artificial Sequence
  Description of Artificial Sequence: Synthetic oligonucleotide
atgccgtaggatgccgtagg

SEQ ID NO: 431 - DNA, 20 bp, Artificial Sequence
  Description of Artificial Sequence: Synthetic oligonucleotide
atgcgcgatcatgcgcgatc

SEQ ID NO: 432 - DNA, 20 bp, Artificial Sequence
  Description of Artificial Sequence: Synthetic oligonucleotide
atgtggtgatatgtggtgat

SEQ ID NO: 433 - DNA, 20 bp, Artificial Sequence
  Description of Artificial Sequence: Synthetic oligonucleotide
attacgagccattacgagcc

SEQ ID NO: 434 - DNA, 20 bp, Artificial Sequence
  Description of Artificial Sequence: Synthetic oligonucleotide
attccacggcattccacggc

SEQ ID NO: 435 - DNA, 20 bp, Artificial Sequence
  Description of Artificial Sequence: Synthetic oligonucleotide
attcggcgtcattcggcgtc

SEQ ID NO: 436 - DNA, 20 bp, Artificial Sequence
  Description of Artificial Sequence: Synthetic oligonucleotide
attggaagccattggaagcc

SEQ ID NO: 437 - DNA, 20 bp, Artificial Sequence
  Description of Artificial Sequence: Synthetic oligonucleotide
attgtcggccattgtcggcc

SEQ ID NO: 438 - DNA, 20 bp, Artificial Sequence
  Description of Artificial Sequence: Synthetic oligonucleotide
caaccgcttgcaaccgcttg

SEQ ID NO: 439 - DNA, 20 bp, Artificial Sequence
  Description of Artificial Sequence: Synthetic oligonucleotide
caactggtggcaactggtgg

SEQ ID NO: 440 - DNA, 20 bp, Artificial Sequence
  Description of Artificial Sequence: Synthetic oligonucleotide
caagatggtgcaagatggtg

SEQ ID NO: 441 - DNA, 20 bp, Artificial Sequence
  Description of Artificial Sequence: Synthetic oligonucleotide
caagattcgacaagattcga

SEQ ID NO: 442 - DNA, 20 bp, Artificial Sequence
  Description of Artificial Sequence: Synthetic oligonucleotide
caagcacgagcaagcacgag

SEQ ID NO: 443 - DNA, 20 bp, Artificial Sequence
  Description of Artificial Sequence: Synthetic oligonucleotide
caagcctgtgcaagcctgtg

SEQ ID NO: 444 - DNA, 20 bp, Artificial Sequence
  Description of Artificial Sequence: Synthetic oligonucleotide
caagctcacgcaagctcacg

SEQ ID NO: 445 - DNA, 20 bp, Artificial Sequence
  Description of Artificial Sequence: Synthetic oligonucleotide
caaggttgcgcaaggttgcg

SEQ ID NO: 446 - DNA, 20 bp, Artificial Sequence
  Description of Artificial Sequence: Synthetic oligonucleotide
caagtcgacgcaagtcgacg

SEQ ID NO: 447 - DNA, 20 bp, Artificial Sequence
  Description of Artificial Sequence: Synthetic oligonucleotide
caccacgaagcaccacgaag

SEQ ID NO: 448 - DNA, 20 bp, Artificial Sequence
  Description of Artificial Sequence: Synthetic oligonucleotide
caccgatattcaccgatatt

SEQ ID NO: 449 - DNA, 20 bp, Artificial Sequence
  Description of Artificial Sequence: Synthetic oligonucleotide
caccgtcgaacaccgtcgaa

SEQ ID NO: 450 - DNA, 20 bp, Artificial Sequence
  Description of Artificial Sequence: Synthetic oligonucleotide
caccgtgacacaccgtgaca

SEQ ID NO: 451 - DNA, 20 bp, Artificial Sequence
  Description of Artificial Sequence: Synthetic oligonucleotide
cacctgctgacacctgctga

SEQ ID NO: 452 - DNA, 20 bp, Artificial Sequence
  Description of Artificial Sequence: Synthetic oligonucleotide
cacgcacatacacgcacata

SEQ ID NO: 453 - DNA, 20 bp, Artificial Sequence
  Description of Artificial Sequence: Synthetic oligonucleotide
cacgctaaggcacgctaagg

SEQ ID NO: 454 - DNA, 20 bp, Artificial Sequence
  Description of Artificial Sequence: Synthetic oligonucleotide
cacgtaatctcacgtaatct

SEQ ID NO: 455 - DNA, 20 bp, Artificial Sequence
  Description of Artificial Sequence: Synthetic oligonucleotide
cacgtggagtcacgtggagt

SEQ ID NO: 456 - DNA, 20 bp, Artificial Sequence
  Description of Artificial Sequence: Synthetic oligonucleotide
cactcgagagcactcgagag

SEQ ID NO: 457 - DNA, 20 bp, Artificial Sequence
  Description of Artificial Sequence: Synthetic oligonucleotide
cactctctgacactctctga

SEQ ID NO: 458 - DNA, 20 bp, Artificial Sequence
  Description of Artificial Sequence: Synthetic oligonucleotide
cactctggctcactctggct

SEQ ID NO: 459 - DNA, 20 bp, Artificial Sequence
  Description of Artificial Sequence: Synthetic oligonucleotide
cactgccatgcactgccatg

SEQ ID NO: 460 - DNA, 20 bp, Artificial Sequence
  Description of Artificial Sequence: Synthetic oligonucleotide
cacttgaactcacttgaact

SEQ ID NO: 461 - DNA, 20 bp, Artificial Sequence
  Description of Artificial Sequence: Synthetic oligonucleotide
cagacctgagcagacctgag

SEQ ID NO: 462 - DNA, 20 bp, Artificial Sequence
  Description of Artificial Sequence: Synthetic oligonucleotide
cagcgagcatcagcgagcat

SEQ ID NO: 463 - DNA, 20 bp, Artificial Sequence
  Description of Artificial Sequence: Synthetic oligonucleotide
caggaagaggcaggaagagg

SEQ ID NO: 464 - DNA, 20 bp, Artificial Sequence
  Description of Artificial Sequence: Synthetic oligonucleotide
cagtctcatacagtctcata

SEQ ID NO: 465 - DNA, 20 bp, Artificial Sequence
  Description of Artificial Sequence: Synthetic oligonucleotide
cagttatcgacagttatcga

SEQ ID NO: 466 - DNA, 20 bp, Artificial Sequence
  Description of Artificial Sequence: Synthetic oligonucleotide
catacacgcgcatacacgcg

SEQ ID NO: 467 - DNA, 20 bp, Artificial Sequence
  Description of Artificial Sequence: Synthetic oligonucleotide
cataccgacgcataccgacg

SEQ ID NO: 468 - DNA, 20 bp, Artificial Sequence
  Description of Artificial Sequence: Synthetic oligonucleotide
catcaatggtcatcaatggt

SEQ ID NO: 469 - DNA, 20 bp, Artificial Sequence
  Description of Artificial Sequence: Synthetic oligonucleotide
catgacaccgcatgacaccg

SEQ ID NO: 470 - DNA, 20 bp, Artificial Sequence
  Description of Artificial Sequence: Synthetic oligonucleotide
catggttcggcatggttcgg

SEQ ID NO: 471 - DNA, 20 bp, Artificial Sequence
  Description of Artificial Sequence: Synthetic oligonucleotide
cattggagcgcattggagcg

SEQ ID NO: 472 - DNA, 20 bp, Artificial Sequence
  Description of Artificial Sequence: Synthetic oligonucleotide
ccaacgagagccaacgagag

SEQ ID NO: 473 - DNA, 20 bp, Artificial Sequence
  Description of Artificial Sequence: Synthetic oligonucleotide
ccaagaccagccaagaccag

SEQ ID NO: 474 - DNA, 20 bp, Artificial Sequence
  Description of Artificial Sequence: Synthetic oligonucleotide
ccaatcacggccaatcacgg

SEQ ID NO: 475 - DNA, 20 bp, Artificial Sequence
  Description of Artificial Sequence: Synthetic oligonucleotide
ccaccgttgtccaccgttgt

SEQ ID NO: 476 - DNA, 20 bp, Artificial Sequence
  Description of Artificial Sequence: Synthetic oligonucleotide
ccagatcggaccagatcgga

SEQ ID NO: 477 - DNA, 20 bp, Artificial Sequence
  Description of Artificial Sequence: Synthetic oligonucleotide
ccgaagtcagccgaagtcag

SEQ ID NO: 478 - DNA, 20 bp, Artificial Sequence
  Description of Artificial Sequence: Synthetic oligonucleotide
ccgctgaagtccgctgaagt

SEQ ID NO: 479 - DNA, 20 bp, Artificial Sequence
  Description of Artificial Sequence: Synthetic oligonucleotide
ccggaccataccggaccata

SEQ ID NO: 480 - DNA, 20 bp, Artificial Sequence
  Description of Artificial Sequence: Synthetic oligonucleotide
ccgttctaggccgttctagg

SEQ ID NO: 481 - DNA, 20 bp, Artificial Sequence
  Description of Artificial Sequence: Synthetic oligonucleotide
cctaatgcggcctaatgcgg

SEQ ID NO: 482 - DNA, 20 bp, Artificial Sequence
  Description of Artificial Sequence: Synthetic oligonucleotide
cctatgacgacctatgacga

SEQ ID NO: 483 - DNA, 20 bp, Artificial Sequence
  Description of Artificial Sequence: Synthetic oligonucleotide
cctcaccagtcctcaccagt

SEQ ID NO: 484 - DNA, 20 bp, Artificial Sequence
  Description of Artificial Sequence: Synthetic oligonucleotide
cctgaagacgcctgaagacg

SEQ ID NO: 485 - DNA, 20 bp, Artificial Sequence
  Description of Artificial Sequence: Synthetic oligonucleotide
cctgactcctcctgactcct

SEQ ID NO: 486 - DNA, 20 bp, Artificial Sequence
  Description of Artificial Sequence: Synthetic oligonucleotide
cgaagagtggcgaagagtgg

SEQ ID NO: 487 - DNA, 20 bp, Artificial Sequence
  Description of Artificial Sequence: Synthetic oligonucleotide
cgaaggtggtcgaaggtggt

SEQ ID NO: 488 - DNA, 20 bp, Artificial Sequence
  Description of Artificial Sequence: Synthetic oligonucleotide
cgactagcagcgactagcag

SEQ ID NO: 489 - DNA, 20 bp, Artificial Sequence
  Description of Artificial Sequence: Synthetic oligonucleotide
cgactcgagacgactcgaga

SEQ ID NO: 490 - DNA, 20 bp, Artificial Sequence
  Description of Artificial Sequence: Synthetic oligonucleotide
cgacttacaacgacttacaa

SEQ ID NO: 491 - DNA, 20 bp, Artificial Sequence
  Description of Artificial Sequence: Synthetic oligonucleotide
cgaggattaacgaggattaa

SEQ ID NO: 492 - DNA, 20 bp, Artificial Sequence
  Description of Artificial Sequence: Synthetic oligonucleotide
cgaggcatgtcgaggcatgt

SEQ ID NO: 493 - DNA, 20 bp, Artificial Sequence
  Description of Artificial Sequence: Synthetic oligonucleotide
cgagtctgctcgagtctgct

SEQ ID NO: 494 - DNA, 20 bp, Artificial Sequence
  Description of Artificial Sequence: Synthetic oligonucleotide
cgagtgagcacgagtgagca

SEQ ID NO: 495 - DNA, 20 bp, Artificial Sequence
  Description of Artificial Sequence: Synthetic oligonucleotide
cgatcggaagcgatcggaag

SEQ ID NO: 496 - DNA, 20 bp, Artificial Sequence
  Description of Artificial Sequence: Synthetic oligonucleotide
cgatctaccgcgatctaccg

SEQ ID NO: 497 - DNA, 20 bp, Artificial Sequence
  Description of Artificial Sequence: Synthetic oligonucleotide
cgccaagcttcgccaagctt

SEQ ID NO: 498 - DNA, 20 bp, Artificial Sequence
  Description of Artificial Sequence: Synthetic oligonucleotide
cgccagaattcgccagaatt

SEQ ID NO: 499 - DNA, 20 bp, Artificial Sequence
  Description of Artificial Sequence: Synthetic oligonucleotide
cgcgaatggacgcgaatgga

SEQ ID NO: 500 - DNA, 20 bp, Artificial Sequence
  Description of Artificial Sequence: Synthetic oligonucleotide
cgctcatcctcgctcatcct

SEQ ID NO: 501 - DNA, 20 bp, Artificial Sequence
  Description of Artificial Sequence: Synthetic oligonucleotide
cgctcgaatgcgctcgaatg

SEQ ID NO: 502 - DNA, 20 bp, Artificial Sequence
  Description of Artificial Sequence: Synthetic oligonucleotide
cgcttactatcgcttactat

SEQ ID NO: 503 - DNA, 20 bp, Artificial Sequence
  Description of Artificial Sequence: Synthetic oligonucleotide
cgcttagcgtcgcttagcgt

SEQ ID NO: 504 - DNA, 20 bp, Artificial Sequence
  Description of Artificial Sequence: Synthetic oligonucleotide
cggacttaagcggacttaag

SEQ ID NO: 505 - DNA, 20 bp, Artificial Sequence
  Description of Artificial Sequence: Synthetic oligonucleotide
cggcgaacaacggcgaacaa

SEQ ID NO: 506 - DNA, 20 bp, Artificial Sequence
  Description of Artificial Sequence: Synthetic oligonucleotide
cggcttggaacggcttggaa

SEQ ID NO: 507 - DNA, 20 bp, Artificial Sequence
  Description of Artificial Sequence: Synthetic oligonucleotide
cggtagtgctcggtagtgct

SEQ ID NO: 508 - DNA, 20 bp, Artificial Sequence
  Description of Artificial Sequence: Synthetic oligonucleotide
cggttacacacggttacaca

SEQ ID NO: 509 - DNA, 20 bp, Artificial Sequence
  Description of Artificial Sequence: Synthetic oligonucleotide
cgtaccgtgtcgtaccgtgt

SEQ ID NO: 510 - DNA, 20 bp, Artificial Sequence
  Description of Artificial Sequence: Synthetic oligonucleotide
cgtagagccacgtagagcca

SEQ ID NO: 511 - DNA, 20 bp, Artificial Sequence
  Description of Artificial Sequence: Synthetic oligonucleotide
cgtaggactgcgtaggactg

SEQ ID NO: 512 - DNA, 20 bp, Artificial Sequence
  Description of Artificial Sequence: Synthetic oligonucleotide
cgtatcacaacgtatcacaa

SEQ ID NO: 513 - DNA, 20 bp, Artificial Sequence
  Description of Artificial Sequence: Synthetic oligonucleotide
cgtgttgcgacgtgttgcga

SEQ ID NO: 514 - DNA, 20 bp, Artificial Sequence
  Description of Artificial Sequence: Synthetic oligonucleotide
cgttggtccacgttggtcca

SEQ ID NO: 515 - DNA, 20 bp, Artificial Sequence
  Description of Artificial Sequence: Synthetic oligonucleotide
ctacagccgactacagccga

SEQ ID NO: 516 - DNA, 20 bp, Artificial Sequence
  Description of Artificial Sequence: Synthetic oligonucleotide
ctacgcaaggctacgcaagg

SEQ ID NO: 517 - DNA, 20 bp, Artificial Sequence
  Description of Artificial Sequence: Synthetic oligonucleotide
ctacggtgtgctacggtgtg

SEQ ID NO: 518 - DNA, 20 bp, Artificial Sequence
  Description of Artificial Sequence: Synthetic oligonucleotide
ctacgttcctctacgttcct

SEQ ID NO: 519 - DNA, 20 bp, Artificial Sequence
  Description of Artificial Sequence: Synthetic oligonucleotide
ctagaggcagctagaggcag

SEQ ID NO: 520 - DNA, 20 bp, Artificial Sequence
  Description of Artificial Sequence: Synthetic oligonucleotide
ctaggtccagctaggtccag

SEQ ID NO: 521 - DNA, 20 bp, Artificial Sequence
  Description of Artificial Sequence: Synthetic oligonucleotide
ctaggtcgctctaggtcgct

SEQ ID NO: 522 - DNA, 20 bp, Artificial Sequence
  Description of Artificial Sequence: Synthetic oligonucleotide
ctatcgccgtctatcgccgt

SEQ ID NO: 523 - DNA, 20 bp, Artificial Sequence
  Description of Artificial Sequence: Synthetic oligonucleotide
ctatggatctctatggatct

SEQ ID NO: 524 - DNA, 20 bp, Artificial Sequence
  Description of Artificial Sequence: Synthetic oligonucleotide
ctcgcgagttctcgcgagtt

SEQ ID NO: 525 - DNA, 20 bp, Artificial Sequence
  Description of Artificial Sequence: Synthetic oligonucleotide
ctcgtggcaactcgtggcaa

SEQ ID NO: 526 - DNA, 20 bp, Artificial Sequence
  Description of Artificial Sequence: Synthetic oligonucleotide
ctctacaactctctacaact

SEQ ID NO: 527 - DNA, 20 bp, Artificial Sequence
  Description of Artificial Sequence: Synthetic oligonucleotide
ctctatatcgctctatatcg

SEQ ID NO: 528 - DNA, 20 bp, Artificial Sequence
  Description of Artificial Sequence: Synthetic oligonucleotide
ctctccttcactctccttca

SEQ ID NO: 529 - DNA, 20 bp, Artificial Sequence
  Description of Artificial Sequence: Synthetic oligonucleotide
ctctcttgcgctctcttgcg

SEQ ID NO: 530 - DNA, 20 bp, Artificial Sequence
  Description of Artificial Sequence: Synthetic oligonucleotide
ctctgcgttgctctgcgttg

SEQ ID NO: 531 - DNA, 20 bp, Artificial Sequence
  Description of Artificial Sequence: Synthetic oligonucleotide
ctgaatccagctgaatccag

SEQ ID NO: 532 - DNA, 20 bp, Artificial Sequence
  Description of Artificial Sequence: Synthetic oligonucleotide
ctgagcttggctgagcttgg

SEQ ID NO: 533 - DNA, 20 bp, Artificial Sequence
  Description of Artificial Sequence: Synthetic oligonucleotide
ctggatccgactggatccga

SEQ ID NO: 534 - DNA, 20 bp, Artificial Sequence
  Description of Artificial Sequence: Synthetic oligonucleotide
ctggtctgatctggtctgat

SEQ ID NO: 535 - DNA, 20 bp, Artificial Sequence
  Description of Artificial Sequence: Synthetic oligonucleotide
ctgtccacagctgtccacag

SEQ ID NO: 536 - DNA, 20 bp, Artificial Sequence
  Description of Artificial Sequence: Synthetic oligonucleotide
ctgtcctcctctgtcctcct

SEQ ID NO: 537 - DNA, 20 bp, Artificial Sequence
  Description of Artificial Sequence: Synthetic oligonucleotide
ctgtcggatgctgtcggatg

SEQ ID NO: 538 - DNA, 20 bp, Artificial Sequence
  Description of Artificial Sequence: Synthetic oligonucleotide
cttcatctgacttcatctga

SEQ ID NO: 539 - DNA, 20 bp, Artificial Sequence
  Description of Artificial Sequence: Synthetic oligonucleotide
cttcctgcgtcttcctgcgt

SEQ ID NO: 540 - DNA, 20 bp, Artificial Sequence
  Description of Artificial Sequence: Synthetic oligonucleotide
cttcggctagcttcggctag

SEQ ID NO: 541 - DNA, 20 bp, Artificial Sequence
  Description of Artificial Sequence: Synthetic oligonucleotide
cttcttatggcttcttatgg

SEQ ID NO: 542 - DNA, 20 bp, Artificial Sequence
  Description of Artificial Sequence: Synthetic oligonucleotide
cttcttggatcttcttggat

SEQ ID NO: 543 - DNA, 20 bp, Artificial Sequence
  Description of Artificial Sequence: Synthetic oligonucleotide
cttgcgatggcttgcgatgg

SEQ ID NO: 544 - DNA, 20 bp, Artificial Sequence
  Description of Artificial Sequence: Synthetic oligonucleotide
gaacctcagcgaacctcagc

SEQ ID NO: 545 - DNA, 20 bp, Artificial Sequence
  Description of Artificial Sequence: Synthetic oligonucleotide
gaacggattagaacggatta

SEQ ID NO: 546 - DNA, 20 bp, Artificial Sequence
  Description of Artificial Sequence: Synthetic oligonucleotide
gaacgtcattgaacgtcatt

SEQ ID NO: 547 - DNA, 20 bp, Artificial Sequence
  Description of Artificial Sequence: Synthetic oligonucleotide
gaactgatccgaactgatcc

SEQ ID NO: 548 - DNA, 20 bp, Artificial Sequence
  Description of Artificial Sequence: Synthetic oligonucleotide
gacagcagtcgacagcagtc

SEQ ID NO: 549 - DNA, 20 bp, Artificial Sequence
  Description of Artificial Sequence: Synthetic oligonucleotide
gaccgaatgtgaccgaatgt

SEQ ID NO: 550 - DNA, 20 bp, Artificial Sequence
  Description of Artificial Sequence: Synthetic oligonucleotide
gacgccatcagacgccatca

SEQ ID NO: 551 - DNA, 20 bp, Artificial Sequence
  Description of Artificial Sequence: Synthetic oligonucleotide
gacgcgatacgacgcgatac

SEQ ID NO: 552 - DNA, 20 bp, Artificial Sequence
  Description of Artificial Sequence: Synthetic oligonucleotide
gacgctgtgagacgctgtga

SEQ ID NO: 553 - DNA, 20 bp, Artificial Sequence
  Description of Artificial Sequence: Synthetic oligonucleotide
gacggaccttgacggacctt

SEQ ID NO: 554 - DNA, 20 bp, Artificial Sequence
  Description of Artificial Sequence: Synthetic oligonucleotide
gacggagtctgacggagtct

SEQ ID NO: 555 - DNA, 20 bp, Artificial Sequence
  Description of Artificial Sequence: Synthetic oligonucleotide
gagcacaaccgagcacaacc

SEQ ID NO: 556 - DNA, 20 bp, Artificial Sequence
  Description of Artificial Sequence: Synthetic oligonucleotide
gaggaagaccgaggaagacc

SEQ ID NO: 557 - DNA, 20 bp, Artificial Sequence
  Description of Artificial Sequence: Synthetic oligonucleotide
gaggcacgatgaggcacgat

SEQ ID NO: 558 - DNA, 20 bp, Artificial Sequence
  Description of Artificial Sequence: Synthetic oligonucleotide
gaggtgaagcgaggtgaagc

SEQ ID NO: 559 - DNA, 20 bp, Artificial Sequence
  Description of Artificial Sequence: Synthetic oligonucleotide
gagtcacaccgagtcacacc

SEQ ID NO: 560 - DNA, 20 bp, Artificial Sequence
  Description of Artificial Sequence: Synthetic oligonucleotide
gagtccagacgagtccagac

SEQ ID NO: 561 - DNA, 20 bp, Artificial Sequence
  Description of Artificial Sequence: Synthetic oligonucleotide
gataacctgtgataacctgt

SEQ ID NO: 562 - DNA, 20 bp, Artificial Sequence
  Description of Artificial Sequence: Synthetic oligonucleotide
gatccaaggcgatccaaggc

SEQ ID NO: 563 - DNA, 20 bp, Artificial Sequence
  Description of Artificial Sequence: Synthetic oligonucleotide
gatcgagccagatcgagcca

SEQ ID NO: 564 - DNA, 20 bp, Artificial Sequence
  Description of Artificial Sequence: Synthetic oligonucleotide
gatggcaatcgatggcaatc

SEQ ID NO: 565 - DNA, 20 bp, Artificial Sequence
  Description of Artificial Sequence: Synthetic oligonucleotide
gattaccaacgattaccaac

SEQ ID NO: 566 - DNA, 20 bp, Artificial Sequence
  Description of Artificial Sequence: Synthetic oligonucleotide
gattcgtcttgattcgtctt

SEQ ID NO: 567 - DNA, 20 bp, Artificial Sequence
  Description of Artificial Sequence: Synthetic oligonucleotide
gattgttggagattgttgga

SEQ ID NO: 568 - DNA, 20 bp, Artificial Sequence
  Description of Artificial Sequence: Synthetic oligonucleotide
gcaacacggagcaacacgga

SEQ ID NO: 569 - DNA, 20 bp, Artificial Sequence
  Description of Artificial Sequence: Synthetic oligonucleotide
gcaatggtacgcaatggtac

SEQ ID NO: 570 - DNA, 20 bp, Artificial Sequence
  Description of Artificial Sequence: Synthetic oligonucleotide
gcaccacattgcaccacatt

SEQ ID NO: 571 - DNA, 20 bp, Artificial Sequence
  Description of Artificial Sequence: Synthetic oligonucleotide
gcagattggcgcagattggc

SEQ ID NO: 572 - DNA, 20 bp, Artificial Sequence
  Description of Artificial Sequence: Synthetic oligonucleotide
gcaggatagcgcaggatagc

SEQ ID NO: 573 - DNA, 20 bp, Artificial Sequence
  Description of Artificial Sequence: Synthetic oligonucleotide
gcattaatccgcattaatcc

SEQ ID NO: 574 - DNA, 20 bp, Artificial Sequence
  Description of Artificial Sequence: Synthetic oligonucleotide
gccaccatctgccaccatct

SEQ ID NO: 575 - DNA, 20 bp, Artificial Sequence
  Description of Artificial Sequence: Synthetic oligonucleotide
gccagataccgccagatacc

SEQ ID NO: 576 - DNA, 20 bp, Artificial Sequence
  Description of Artificial Sequence: Synthetic oligonucleotide
gccatagatagccatagata

SEQ ID NO: 577 - DNA, 20 bp, Artificial Sequence
  Description of Artificial Sequence: Synthetic oligonucleotide
gccattggacgccattggac

SEQ ID NO: 578 - DNA, 20 bp, Artificial Sequence
  Description of Artificial Sequence: Synthetic oligonucleotide
gccgaatcctgccgaatcct

SEQ ID NO: 579 - DNA, 20 bp, Artificial Sequence
  Description of Artificial Sequence: Synthetic oligonucleotide
gccgtgtctagccgtgtcta

SEQ ID NO: 580 - DNA, 20 bp, Artificial Sequence
  Description of Artificial Sequence: Synthetic oligonucleotide
gccttatctcgccttatctc

SEQ ID NO: 581 - DNA, 20 bp, Artificial Sequence
  Description of Artificial Sequence: Synthetic oligonucleotide
gccttcgcttgccttcgctt

SEQ ID NO: 582 - DNA, 20 bp, Artificial Sequence
  Description of Artificial Sequence: Synthetic oligonucleotide
gcgaagtggtgcgaagtggt

SEQ ID NO: 583 - DNA, 20 bp, Artificial Sequence
  Description of Artificial Sequence: Synthetic oligonucleotide
gcgaatatctgcgaatatct

SEQ ID NO: 584 - DNA, 20 bp, Artificial Sequence
  Description of Artificial Sequence: Synthetic oligonucleotide
gcgctgatacgcgctgatac

SEQ ID NO: 585 - DNA, 20 bp, Artificial Sequence
  Description of Artificial Sequence: Synthetic oligonucleotide
gcggacttctgcggacttct

SEQ ID NO: 586 - DNA, 20 bp, Artificial Sequence
  Description of Artificial Sequence: Synthetic oligonucleotide
gcggataagtgcggataagt

SEQ ID NO: 587 - DNA, 20 bp, Artificial Sequence
  Description of Artificial Sequence: Synthetic oligonucleotide
gcggtccattgcggtccatt

SEQ ID NO: 588 - DNA, 20 bp, Artificial Sequence
  Description of Artificial Sequence: Synthetic oligonucleotide
gctcagttaagctcagttaa

SEQ ID NO: 589 - DNA, 20 bp, Artificial Sequence
  Description of Artificial Sequence: Synthetic oligonucleotide
gctcattctagctcattcta

SEQ ID NO: 590 - DNA, 20 bp, Artificial Sequence
  Description of Artificial Sequence: Synthetic oligonucleotide
gctcctaagcgctcctaagc

SEQ ID NO: 591 - DNA, 20 bp, Artificial Sequence
  Description of Artificial Sequence: Synthetic oligonucleotide
gctggaaggagctggaagga

SEQ ID NO: 592 - DNA, 20 bp, Artificial Sequence
  Description of Artificial Sequence: Synthetic oligonucleotide
ggaacaatgtggaacaatgt

SEQ ID NO: 593 - DNA, 20 bp, Artificial Sequence
  Description of Artificial Sequence: Synthetic oligonucleotide
ggaacatctcggaacatctc

SEQ ID NO: 594 - DNA, 20 bp, Artificial Sequence
  Description of Artificial Sequence: Synthetic oligonucleotide
ggaaccagtaggaaccagta

SEQ ID NO: 595 - DNA, 20 bp, Artificial Sequence
  Description of Artificial Sequence: Synthetic oligonucleotide
ggaacgacttggaacgactt

SEQ ID NO: 596 - DNA, 20 bp, Artificial Sequence
  Description of Artificial Sequence: Synthetic oligonucleotide
ggaagatgatggaagatgat

SEQ ID NO: 597 - DNA, 20 bp, Artificial Sequence
  Description of Artificial Sequence: Synthetic oligonucleotide
ggaaggagacggaaggagac

SEQ ID NO: 598 - DNA, 20 bp, Artificial Sequence
  Description of Artificial Sequence: Synthetic oligonucleotide
ggaagtggtaggaagtggta

SEQ ID NO: 599 - DNA, 20 bp, Artificial Sequence
  Description of Artificial Sequence: Synthetic oligonucleotide
ggaatcaggtggaatcaggt

SEQ ID NO: 600 - DNA, 20 bp, Artificial Sequence
  Description of Artificial Sequence: Synthetic oligonucleotide
ggaatgtgtaggaatgtgta

SEQ ID NO: 601 - DNA, 20 bp, Artificial Sequence
  Description of Artificial Sequence: Synthetic oligonucleotide
ggagataggaggagatagga

SEQ ID NO: 602 - DNA, 20 bp, Artificial Sequence
  Description of Artificial Sequence: Synthetic oligonucleotide
ggagcaatccggagcaatcc

SEQ ID NO: 603 - DNA, 20 bp, Artificial Sequence
  Description of Artificial Sequence: Synthetic oligonucleotide
ggaggacatcggaggacatc

SEQ ID NO: 604 - DNA, 20 bp, Artificial Sequence
  Description of Artificial Sequence: Synthetic oligonucleotide
ggcaatagccggcaatagcc

SEQ ID NO: 605 - DNA, 20 bp, Artificial Sequence
  Description of Artificial Sequence: Synthetic oligonucleotide
ggcagaaggaggcagaagga

SEQ ID NO: 606 - DNA, 20 bp, Artificial Sequence
  Description of Artificial Sequence: Synthetic oligonucleotide
ggcaggaataggcaggaata

SEQ ID NO: 607 - DNA, 20 bp, Artificial Sequence
  Description of Artificial Sequence: Synthetic oligonucleotide
ggcatacaccggcatacacc

SEQ ID NO: 608 - DNA, 20 bp, Artificial Sequence
  Description of Artificial Sequence: Synthetic oligonucleotide
ggccgttgtaggccgttgta

SEQ ID NO: 609 - DNA, 20 bp, Artificial Sequence
  Description of Artificial Sequence: Synthetic oligonucleotide
ggcctgcttaggcctgctta

SEQ ID NO: 610 - DNA, 20 bp, Artificial Sequence
  Description of Artificial Sequence: Synthetic oligonucleotide
ggcgaggtaaggcgaggtaa

SEQ ID NO: 611 - DNA, 20 bp, Artificial Sequence
  Description of Artificial Sequence: Synthetic oligonucleotide
ggcgtgacatggcgtgacat

SEQ ID NO: 612 - DNA, 20 bp, Artificial Sequence
  Description of Artificial Sequence: Synthetic oligonucleotide
ggctccaagaggctccaaga

SEQ ID NO: 613 - DNA, 20 bp, Artificial Sequence
  Description of Artificial Sequence: Synthetic oligonucleotide
ggctgctcaaggctgctcaa

SEQ ID NO: 614 - DNA, 20 bp, Artificial Sequence
  Description of Artificial Sequence: Synthetic oligonucleotide
ggctgtgcttggctgtgctt

SEQ ID NO: 615 - DNA, 20 bp, Artificial Sequence
  Description of Artificial Sequence: Synthetic oligonucleotide
ggcttctgtcggcttctgtc

SEQ ID NO: 616 - DNA, 20 bp, Artificial Sequence
  Description of Artificial Sequence: Synthetic oligonucleotide
ggtatcgcttggtatcgctt

SEQ ID NO: 617 - DNA, 20 bp, Artificial Sequence
  Description of Artificial Sequence: Synthetic oligonucleotide
ggtccttccaggtccttcca

SEQ ID NO: 618 - DNA, 20 bp, Artificial Sequence
  Description of Artificial Sequence: Synthetic oligonucleotide
ggtcggttatggtcggttat

SEQ ID NO: 619 - DNA, 20 bp, Artificial Sequence
  Description of Artificial Sequence: Synthetic oligonucleotide
ggtctgacgaggtctgacga

SEQ ID NO: 620 - DNA, 20 bp, Artificial Sequence
  Description of Artificial Sequence: Synthetic oligonucleotide
ggtgaccactggtgaccact

SEQ ID NO: 621 - DNA, 20 bp, Artificial Sequence
  Description of Artificial Sequence: Synthetic oligonucleotide
ggtgagtccaggtgagtcca

SEQ ID NO: 622 - DNA, 20 bp, Artificial Sequence
  Description of Artificial Sequence: Synthetic oligonucleotide
ggtggcgaatggtggcgaat

SEQ ID NO: 623 - DNA, 20 bp, Artificial Sequence
  Description of Artificial Sequence: Synthetic oligonucleotide
ggtgtatatcggtgtatatc

SEQ ID NO: 624 - DNA, 20 bp, Artificial Sequence
  Description of Artificial Sequence: Synthetic oligonucleotide
ggttccttaaggttccttaa

SEQ ID NO: 625 - DNA, 20 bp, Artificial Sequence
  Description of Artificial Sequence: Synthetic oligonucleotide
ggttctacaaggttctacaa

SEQ ID NO: 626 - DNA, 20 bp, Artificial Sequence
  Description of Artificial Sequence: Synthetic oligonucleotide
ggttggcgttggttggcgtt

SEQ ID NO: 627 - DNA, 20 bp, Artificial Sequence
  Description of Artificial Sequence: Synthetic oligonucleotide
gtaacacgctgtaacacgct

SEQ ID NO: 628 - DNA, 20 bp, Artificial Sequence
  Description of Artificial Sequence: Synthetic oligonucleotide
gtagagcgacgtagagcgac

SEQ ID NO: 629 - DNA, 20 bp, Artificial Sequence
  Description of Artificial Sequence: Synthetic oligonucleotide
gtagctgctcgtagctgctc

SEQ ID NO: 630 - DNA, 20 bp, Artificial Sequence
  Description of Artificial Sequence: Synthetic oligonucleotide
gtaggtggatgtaggtggat

SEQ ID NO: 631 - DNA, 20 bp, Artificial Sequence
  Description of Artificial Sequence: Synthetic oligonucleotide
gtagtcagccgtagtcagcc

SEQ ID NO: 632 - DNA, 20 bp, Artificial Sequence
  Description of Artificial Sequence: Synthetic oligonucleotide
gtccttccacgtccttccac

SEQ ID NO: 633 - DNA, 20 bp, Artificial Sequence
  Description of Artificial Sequence: Synthetic oligonucleotide
gtcgagcagtgtcgagcagt

SEQ ID NO: 634 - DNA, 20 bp, Artificial Sequence
  Description of Artificial Sequence: Synthetic oligonucleotide
gtcgcacagagtcgcacaga

SEQ ID NO: 635 - DNA, 20 bp, Artificial Sequence
  Description of Artificial Sequence: Synthetic oligonucleotide
gtcgcacttcgtcgcacttc

SEQ ID NO: 636 - DNA, 20 bp, Artificial Sequence
  Description of Artificial Sequence: Synthetic oligonucleotide
gtctggtggtgtctggtggt

SEQ ID NO: 637 - DNA, 20 bp, Artificial Sequence
  Description of Artificial Sequence: Synthetic oligonucleotide
gtgaactgttgtgaactgtt

SEQ ID NO: 638 - DNA, 20 bp, Artificial Sequence
  Description of Artificial Sequence: Synthetic oligonucleotide
gtgccatcctgtgccatcct

SEQ ID NO: 639 - DNA, 20 bp, Artificial Sequence
  Description of Artificial Sequence: Synthetic oligonucleotide
gtgcgtgaacgtgcgtgaac

SEQ ID NO: 640 - DNA, 20 bp, Artificial Sequence
  Description of Artificial Sequence: Synthetic oligonucleotide
gtggagatgtgtggagatgt

SEQ ID NO: 641 - DNA, 20 bp, Artificial Sequence
  Description of Artificial Sequence: Synthetic oligonucleotide
gtggtgcaacgtggtgcaac

SEQ ID NO: 642 - DNA, 20 bp, Artificial Sequence
  Description of Artificial Sequence: Synthetic oligonucleotide
gtgtcgttaagtgtcgttaa

SEQ ID NO: 643 - DNA, 20 bp, Artificial Sequence
  Description of Artificial Sequence: Synthetic oligonucleotide
gtgtctcaatgtgtctcaat

SEQ ID NO: 644 - DNA, 20 bp, Artificial Sequence
  Description of Artificial Sequence: Synthetic oligonucleotide
gtgtgatgacgtgtgatgac

SEQ ID NO: 645 - DNA, 20 bp, Artificial Sequence
  Description of Artificial Sequence: Synthetic oligonucleotide
gttagatcgcgttagatcgc

SEQ ID NO: 646 - DNA, 20 bp, Artificial Sequence
  Description of Artificial Sequence: Synthetic oligonucleotide
taagccgatataagccgata

SEQ ID NO: 647 - DNA, 20 bp, Artificial Sequence
  Description of Artificial Sequence: Synthetic oligonucleotide
taaggacacctaaggacacc

SEQ ID NO: 648 - DNA, 20 bp, Artificial Sequence
  Description of Artificial Sequence: Synthetic oligonucleotide
taaggccaagtaaggccaag

SEQ ID NO: 649 - DNA, 20 bp, Artificial Sequence
  Description of Artificial Sequence: Synthetic oligonucleotide
taatagcgagtaatagcgag

SEQ ID NO: 650 - DNA, 20 bp, Artificial Sequence
  Description of Artificial Sequence: Synthetic oligonucleotide
taatggccggtaatggccgg

SEQ ID NO: 651 - DNA, 20 bp, Artificial Sequence
  Description of Artificial Sequence: Synthetic oligonucleotide
taccattggataccattgga

SEQ ID NO: 652 - DNA, 20 bp, Artificial Sequence
  Description of Artificial Sequence: Synthetic oligonucleotide
tacgaccacctacgaccacc

SEQ ID NO: 653 - DNA, 20 bp, Artificial Sequence
  Description of Artificial Sequence: Synthetic oligonucleotide
tacgaccttatacgacctta

SEQ ID NO: 654 - DNA, 20 bp, Artificial Sequence
  Description of Artificial Sequence: Synthetic oligonucleotide
tacgtgattctacgtgattc

SEQ ID NO: 655 - DNA, 20 bp, Artificial Sequence
  Description of Artificial Sequence: Synthetic oligonucleotide
tactagtcagtactagtcag

SEQ ID NO: 656 - DNA, 20 bp, Artificial Sequence
  Description of Artificial Sequence: Synthetic oligonucleotide
tactgacaagtactgacaag

SEQ ID NO: 657 - DNA, 20 bp, Artificial Sequence
  Description of Artificial Sequence: Synthetic oligonucleotide
tactgctggctactgctggc

SEQ ID NO: 658 - DNA, 20 bp, Artificial Sequence
  Description of Artificial Sequence: Synthetic oligonucleotide
tagaccgtaatagaccgtaa

SEQ ID NO: 659 - DNA, 20 bp, Artificial Sequence
  Description of Artificial Sequence: Synthetic oligonucleotide
tagacgaagatagacgaaga

SEQ ID NO: 660 - DNA, 20 bp, Artificial Sequence
  Description of Artificial Sequence: Synthetic oligonucleotide
tagcctagcctagcctagcc

SEQ ID NO: 661 - DNA, 20 bp, Artificial Sequence
  Description of Artificial Sequence: Synthetic oligonucleotide
tagcgaattctagcgaattc

SEQ ID NO: 662 - DNA, 20 bp, Artificial Sequence
  Description of Artificial Sequence: Synthetic oligonucleotide
tagctgccactagctgccac

SEQ ID NO: 663 - DNA, 20 bp, Artificial Sequence
  Description of Artificial Sequence: Synthetic oligonucleotide
taggtaggcataggtaggca

SEQ ID NO: 664 - DNA, 20 bp, Artificial Sequence
  Description of Artificial Sequence: Synthetic oligonucleotide
tagtcgttactagtcgttac

SEQ ID NO: 665 - DNA, 20 bp, Artificial Sequence
  Description of Artificial Sequence: Synthetic oligonucleotide
tagtgcgaagtagtgcgaag

SEQ ID NO: 666 - DNA, 20 bp, Artificial Sequence
  Description of Artificial Sequence: Synthetic oligonucleotide
tagtggacgctagtggacgc

SEQ ID NO: 667 - DNA, 20 bp, Artificial Sequence
  Description of Artificial Sequence: Synthetic oligonucleotide
tataacggtgtataacggtg

SEQ ID NO: 668 - DNA, 20 bp, Artificial Sequence
  Description of Artificial Sequence: Synthetic oligonucleotide
tatagaaccgtatagaaccg

SEQ ID NO: 669 - DNA, 20 bp, Artificial Sequence
  Description of Artificial Sequence: Synthetic oligonucleotide
tatccgaaggtatccgaagg

SEQ ID NO: 670 - DNA, 20 bp, Artificial Sequence
  Description of Artificial Sequence: Synthetic oligonucleotide
tatcggagcctatcggagcc

SEQ ID NO: 671 - DNA, 20 bp, Artificial Sequence
  Description of Artificial Sequence: Synthetic oligonucleotide
tatcggcctgtatcggcctg

SEQ ID NO: 672 - DNA, 20 bp, Artificial Sequence
  Description of Artificial Sequence: Synthetic oligonucleotide
tatcgtcggctatcgtcggc

SEQ ID NO: 673 - DNA, 20 bp, Artificial Sequence
  Description of Artificial Sequence: Synthetic oligonucleotide
tatgcgccactatgcgccac

SEQ ID NO: 674 - DNA, 20 bp, Artificial Sequence
  Description of Artificial Sequence: Synthetic oligonucleotide
tatggccgtctatggccgtc

SEQ ID NO: 675 - DNA, 20 bp, Artificial Sequence
  Description of Artificial Sequence: Synthetic oligonucleotide
tattcttccgtattcttccg

SEQ ID NO: 676 - DNA, 20 bp, Artificial Sequence
  Description of Artificial Sequence: Synthetic oligonucleotide
tcaagcaacgtcaagcaacg

SEQ ID NO: 677 - DNA, 20 bp, Artificial Sequence
  Description of Artificial Sequence: Synthetic oligonucleotide
tcaagcagtctcaagcagtc

SEQ ID NO: 678 - DNA, 20 bp, Artificial Sequence
  Description of Artificial Sequence: Synthetic oligonucleotide
tcaagtccgatcaagtccga

SEQ ID NO: 679 - DNA, 20 bp, Artificial Sequence
  Description of Artificial Sequence: Synthetic oligonucleotide
tcaatcgagatcaatcgaga

SEQ ID NO: 680 - DNA, 20 bp, Artificial Sequence
  Description of Artificial Sequence: Synthetic oligonucleotide
tcaatgtcgatcaatgtcga

SEQ ID NO: 681 - DNA, 20 bp, Artificial Sequence
  Description of Artificial Sequence: Synthetic oligonucleotide
tcactgaggctcactgaggc

SEQ ID NO: 682 - DNA, 20 bp, Artificial Sequence
  Description of Artificial Sequence: Synthetic oligonucleotide
tcagcgagactcagcgagac

SEQ ID NO: 683 - DNA, 20 bp, Artificial Sequence
  Description of Artificial Sequence: Synthetic oligonucleotide
tcaggaggaatcaggaggaa

SEQ ID NO: 684 - DNA, 20 bp, Artificial Sequence
  Description of Artificial Sequence: Synthetic oligonucleotide
tcaggcacagtcaggcacag

SEQ ID NO: 685 - DNA, 20 bp, Artificial Sequence
  Description of Artificial Sequence: Synthetic oligonucleotide
tcaggcttcctcaggcttcc

SEQ ID NO: 686 - DNA, 20 bp, Artificial Sequence
  Description of Artificial Sequence: Synthetic oligonucleotide
tccacactcgtccacactcg

SEQ ID NO: 687 - DNA, 20 bp, Artificial Sequence
  Description of Artificial Sequence: Synthetic oligonucleotide
tccacagcgatccacagcga

SEQ ID NO: 688 - DNA, 20 bp, Artificial Sequence
  Description of Artificial Sequence: Synthetic oligonucleotide
tccagctgcatccagctgca

SEQ ID NO: 689 - DNA, 20 bp, Artificial Sequence
  Description of Artificial Sequence: Synthetic oligonucleotide
tccataatcctccataatcc

SEQ ID NO: 690 - DNA, 20 bp, Artificial Sequence
  Description of Artificial Sequence: Synthetic oligonucleotide
tccggaccaatccggaccaa

SEQ ID NO: 691 - DNA, 20 bp, Artificial Sequence
  Description of Artificial Sequence: Synthetic oligonucleotide
tccgtaacggtccgtaacgg

SEQ ID NO: 692 - DNA, 20 bp, Artificial Sequence
  Description of Artificial Sequence: Synthetic oligonucleotide
tccgtaggtctccgtaggtc

SEQ ID NO: 693 - DNA, 20 bp, Artificial Sequence
  Description of Artificial Sequence: Synthetic oligonucleotide
tccgtccaagtccgtccaag

SEQ ID NO: 694 - DNA, 20 bp, Artificial Sequence
  Description of Artificial Sequence: Synthetic oligonucleotide
tcctgaaccgtcctgaaccg

SEQ ID NO: 695 - DNA, 20 bp, Artificial Sequence
  Description of Artificial Sequence: Synthetic oligonucleotide
tcctggcatgtcctggcatg

SEQ ID NO: 696 - DNA, 20 bp, Artificial Sequence
  Description of Artificial Sequence: Synthetic oligonucleotide
tcgcgctacatcgcgctaca

SEQ ID NO: 697 - DNA, 20 bp, Artificial Sequence
  Description of Artificial Sequence: Synthetic oligonucleotide
tcggttaccatcggttacca

SEQ ID NO: 698 - DNA, 20 bp, Artificial Sequence
  Description of Artificial Sequence: Synthetic oligonucleotide
tcgtccgtcatcgtccgtca

SEQ ID NO: 699 - DNA, 20 bp, Artificial Sequence
  Description of Artificial Sequence: Synthetic oligonucleotide
tcgtcctcagtcgtcctcag

SEQ ID NO: 700 - DNA, 20 bp, Artificial Sequence
  Description of Artificial Sequence: Synthetic oligonucleotide
tctaccgctctctaccgctc

SEQ ID NO: 701 - DNA, 20 bp, Artificial Sequence
  Description of Artificial Sequence: Synthetic oligonucleotide
tctagctcggtctagctcgg

SEQ ID NO: 702 - DNA, 20 bp, Artificial Sequence
  Description of Artificial Sequence: Synthetic oligonucleotide
tctcggctgatctcggctga

SEQ ID NO: 703 - DNA, 20 bp, Artificial Sequence
  Description of Artificial Sequence: Synthetic oligonucleotide
tctcggtcagtctcggtcag

SEQ ID NO: 704 - DNA, 20 bp, Artificial Sequence
  Description of Artificial Sequence: Synthetic oligonucleotide
tctctagatctctctagatc

SEQ ID NO: 705 - DNA, 20 bp, Artificial Sequence
  Description of Artificial Sequence: Synthetic oligonucleotide
tctgaccgcatctgaccgca

SEQ ID NO: 706 - DNA, 20 bp, Artificial Sequence
  Description of Artificial Sequence: Synthetic oligonucleotide
tctggacagatctggacaga

SEQ ID NO: 707 - DNA, 20 bp, Artificial Sequence
  Description of Artificial Sequence: Synthetic oligonucleotide
tctggataagtctggataag

SEQ ID NO: 708 - DNA, 20 bp, Artificial Sequence
  Description of Artificial Sequence: Synthetic oligonucleotide
tcttacggcctcttacggcc

SEQ ID NO: 709 - DNA, 20 bp, Artificial Sequence
  Description of Artificial Sequence: Synthetic oligonucleotide
tcttgcatactcttgcatac

SEQ ID NO: 710 - DNA, 20 bp, Artificial Sequence
  Description of Artificial Sequence: Synthetic oligonucleotide
tgaacttggatgaacttgga

SEQ ID NO: 711 - DNA, 20 bp, Artificial Sequence
  Description of Artificial Sequence: Synthetic oligonucleotide
tgacacagcgtgacacagcg

SEQ ID NO: 712 - DNA, 20 bp, Artificial Sequence
  Description of Artificial Sequence: Synthetic oligonucleotide
tgacaggtcctgacaggtcc

SEQ ID NO: 713 - DNA, 20 bp, Artificial Sequence
  Description of Artificial Sequence: Synthetic oligonucleotide
tgaccttccgtgaccttccg

SEQ ID NO: 714 - DNA, 20 bp, Artificial Sequence
  Description of Artificial Sequence: Synthetic oligonucleotide
tgacgtcggatgacgtcgga

SEQ ID NO: 715 - DNA, 20 bp, Artificial Sequence
  Description of Artificial Sequence: Synthetic oligonucleotide
tgactatctctgactatctc

SEQ ID NO: 716 - DNA, 20 bp, Artificial Sequence
  Description of Artificial Sequence: Synthetic oligonucleotide
tgactccaggtgactccagg

SEQ ID NO: 717 - DNA, 20 bp, Artificial Sequence
  Description of Artificial Sequence: Synthetic oligonucleotide
tgagagcaggtgagagcagg

SEQ ID NO: 718 - DNA, 20 bp, Artificial Sequence
  Description of Artificial Sequence: Synthetic oligonucleotide
tgagcctccatgagcctcca

SEQ ID NO: 719 - DNA, 20 bp, Artificial Sequence
  Description of Artificial Sequence: Synthetic oligonucleotide
tgagtatggatgagtatgga

SEQ ID NO: 720 - DNA, 20 bp, Artificial Sequence
  Description of Artificial Sequence: Synthetic oligonucleotide
tgcaacatactgcaacatac

SEQ ID NO: 721 - DNA, 20 bp, Artificial Sequence
  Description of Artificial Sequence: Synthetic oligonucleotide
tgcgctgtagtgcgctgtag

SEQ ID NO: 722 - DNA, 20 bp, Artificial Sequence
  Description of Artificial Sequence: Synthetic oligonucleotide
tgctaaccggtgctaaccgg

SEQ ID NO: 723 - DNA, 20 bp, Artificial Sequence
  Description of Artificial Sequence: Synthetic oligonucleotide
tgctccactgtgctccactg

SEQ ID NO: 724 - DNA, 20 bp, Artificial Sequence
  Description of Artificial Sequence: Synthetic oligonucleotide
tggaaggagctggaaggagc

SEQ ID NO: 725 - DNA, 20 bp, Artificial Sequence
  Description of Artificial Sequence: Synthetic oligonucleotide
tggcagtgactggcagtgac

SEQ ID NO: 726 - DNA, 20 bp, Artificial Sequence
  Description of Artificial Sequence: Synthetic oligonucleotide
tggcatcagctggcatcagc

SEQ ID NO: 727 - DNA, 20 bp, Artificial Sequence
  Description of Artificial Sequence: Synthetic oligonucleotide
tggccttatatggccttata

SEQ ID NO: 728 - DNA, 20 bp, Artificial Sequence
  Description of Artificial Sequence: Synthetic oligonucleotide
tggcgaagcatggcgaagca

SEQ ID NO: 729 - DNA, 20 bp, Artificial Sequence
  Description of Artificial Sequence: Synthetic oligonucleotide
tggcttaagatggcttaaga

SEQ ID NO: 730 - DNA, 20 bp, Artificial Sequence
  Description of Artificial Sequence: Synthetic oligonucleotide
tggtcagctctggtcagctc

SEQ ID NO: 731 - DNA, 20 bp, Artificial Sequence
  Description of Artificial Sequence: Synthetic oligonucleotide
tggttccaactggttccaac

SEQ ID NO: 732 - DNA, 20 bp, Artificial Sequence
  Description of Artificial Sequence: Synthetic oligonucleotide
tggttggtaatggttggtaa

SEQ ID NO: 733 - DNA, 20 bp, Artificial Sequence
  Description of Artificial Sequence: Synthetic oligonucleotide
tgtacgcgcatgtacgcgca

SEQ ID NO: 734 - DNA, 20 bp, Artificial Sequence
  Description of Artificial Sequence: Synthetic oligonucleotide
tgtacgctggtgtacgctgg

SEQ ID NO: 735 - DNA, 20 bp, Artificial Sequence
  Description of Artificial Sequence: Synthetic oligonucleotide
tgtagcattgtgtagcattg

SEQ ID NO: 736 - DNA, 20 bp, Artificial Sequence
  Description of Artificial Sequence: Synthetic oligonucleotide
tgtagtgccgtgtagtgccg

SEQ ID NO: 737 - DNA, 20 bp, Artificial Sequence
  Description of Artificial Sequence: Synthetic oligonucleotide
tgtgaatctgtgtgaatctg

SEQ ID NO: 738 - DNA, 20 bp, Artificial Sequence
  Description of Artificial Sequence: Synthetic oligonucleotide
tgttccgtggtgttccgtgg

SEQ ID NO: 739 - DNA, 20 bp, Artificial Sequence
  Description of Artificial Sequence: Synthetic oligonucleotide
ttagcgcgtgttagcgcgtg

SEQ ID NO: 740 - DNA, 20 bp, Artificial Sequence
  Description of Artificial Sequence: Synthetic oligonucleotide
ttagttggacttagttggac

SEQ ID NO: 741 - DNA, 20 bp, Artificial Sequence
  Description of Artificial Sequence: Synthetic oligonucleotide
ttccaacttcttccaacttc

SEQ ID NO: 742 - DNA, 20 bp, Artificial Sequence
  Description of Artificial Sequence: Synthetic oligonucleotide
ttccgtcaggttccgtcagg

SEQ ID NO: 743 - DNA, 20 bp, Artificial Sequence
  Description of Artificial Sequence: Synthetic oligonucleotide
ttcctcaccgttcctcaccg

SEQ ID NO: 744 - DNA, 20 bp, Artificial Sequence
  Description of Artificial Sequence: Synthetic oligonucleotide
ttcctccgacttcctccgac

SEQ ID NO: 745 - DNA, 20 bp, Artificial Sequence
  Description of Artificial Sequence: Synthetic oligonucleotide
ttcgacctggttcgacctgg

SEQ ID NO: 746 - DNA, 20 bp, Artificial Sequence
  Description of Artificial Sequence: Synthetic oligonucleotide
ttcgcgtggattcgcgtgga

SEQ ID NO: 747 - DNA, 20 bp, Artificial Sequence
  Description of Artificial Sequence: Synthetic oligonucleotide
ttcggaagcgttcggaagcg

SEQ ID NO: 748 - DNA, 20 bp, Artificial Sequence
  Description of Artificial Sequence: Synthetic oligonucleotide
ttctcgattgttctcgattg

SEQ ID NO: 749 - DNA, 20 bp, Artificial Sequence
  Description of Artificial Sequence: Synthetic oligonucleotide
ttctctctagttctctctag

SEQ ID NO: 750 - DNA, 20 bp, Artificial Sequence
  Description of Artificial Sequence: Synthetic oligonucleotide
ttcttgcgcgttcttgcgcg

SEQ ID NO: 751 - DNA, 20 bp, Artificial Sequence
  Description of Artificial Sequence: Synthetic oligonucleotide
ttgaggtcggttgaggtcgg

SEQ ID NO: 752 - DNA, 20 bp, Artificial Sequence
  Description of Artificial Sequence: Synthetic oligonucleotide
ttgcacacgcttgcacacgc

SEQ ID NO: 753 - DNA, 20 bp, Artificial Sequence
  Description of Artificial Sequence: Synthetic oligonucleotide
ttgcgctctgttgcgctctg

SEQ ID NO: 754 - DNA, 20 bp, Artificial Sequence
  Description of Artificial Sequence: Synthetic oligonucleotide
ttgctgcagcttgctgcagc

SEQ ID NO: 755 - DNA, 20 bp, Artificial Sequence
  Description of Artificial Sequence: Synthetic oligonucleotide
ttggcgtctgttggcgtctg

SEQ ID NO: 756 - DNA, 20 bp, Artificial Sequence
  Description of Artificial Sequence: Synthetic oligonucleotide
ttggtccttcttggtccttc

SEQ ID NO: 757 - DNA, 20 bp, Artificial Sequence
  Description of Artificial Sequence: Synthetic oligonucleotide
ttgtcgagagttgtcgagag

SEQ ID NO: 758 - DNA, 20 bp, Artificial Sequence
  Description of Artificial Sequence: Synthetic oligonucleotide
ttgtctgtacttgtctgtac

SEQ ID NO: 759 - DNA, 20 bp, Artificial Sequence
  Description of Artificial Sequence: Synthetic oligonucleotide
ttgttctctcttgttctctc

SEQ ID NO: 760 - DNA, 20 bp, Artificial Sequence
  Description of Artificial Sequence: Synthetic oligonucleotide
aacacacgttaacacacgtt

SEQ ID NO: 761 - DNA, 20 bp, Artificial Sequence
  Description of Artificial Sequence: Synthetic oligonucleotide
aacatcgagtaacatcgagt

SEQ ID NO: 762 - DNA, 20 bp, Artificial Sequence
  Description of Artificial Sequence: Synthetic oligonucleotide
aaccgaggacaaccgaggac

SEQ ID NO: 763 - DNA, 20 bp, Artificial Sequence
  Description of Artificial Sequence: Synthetic oligonucleotide
aacctagtagaacctagtag

SEQ ID NO: 764 - DNA, 20 bp, Artificial Sequence
  Description of Artificial Sequence: Synthetic oligonucleotide
aacgcatactaacgcatact

SEQ ID NO: 765 - DNA, 20 bp, Artificial Sequence
  Description of Artificial Sequence: Synthetic oligonucleotide
aactaacctcaactaacctc

SEQ ID NO: 766 - DNA, 20 bp, Artificial Sequence
  Description of Artificial Sequence: Synthetic oligonucleotide
aactaaggagaactaaggag

SEQ ID NO: 767 - DNA, 20 bp, Artificial Sequence
  Description of Artificial Sequence: Synthetic oligonucleotide
aactcgttctaactcgttct

SEQ ID NO: 768 - DNA, 20 bp, Artificial Sequence
  Description of Artificial Sequence: Synthetic oligonucleotide
aactgccgctaactgccgct

SEQ ID NO: 769 - DNA, 24 bp, Artificial Sequence
  Description of Artificial Sequence: Synthetic oligonucleotide
  5' Phos
cagaggatatctgtggatatctgt

SEQ ID NO: 770 - DNA, 24 bp, Artificial Sequence
  Description of Artificial Sequence: Synthetic oligonucleotide
  5' Phos
cagaggctgccataggctgccata

SEQ ID NO: 771 - DNA, 24 bp, Artificial Sequence
  Description of Artificial Sequence: Synthetic oligonucleotide
  5' Phos
cagaggtatgtcaaggtatgtcaa

SEQ ID NO: 772 - DNA, 24 bp, Artificial Sequence
  Description of Artificial Sequence: Synthetic oligonucleotide
  5' Phos
cagaggtgaaggacggtgaaggac

SEQ ID NO: 773 - DNA, 24 bp, Artificial Sequence
  Description of Artificial Sequence: Synthetic oligonucleotide
  5' Phos
cagagtaccagcatgtaccagcat

SEQ ID NO: 774 - DNA, 24 bp, Artificial Sequence
  Description of Artificial Sequence: Synthetic oligonucleotide
  5' Phos
cagagtatacatccgtatacatcc

SEQ ID NO: 775 - DNA, 24 bp, Artificial Sequence
  Description of Artificial Sequence: Synthetic oligonucleotide
  5' Phos
cagagtatcgctcagtatcgctca

SEQ ID NO: 776 - DNA, 24 bp, Artificial Sequence
  Description of Artificial Sequence: Synthetic oligonucleotide
  5' Phos
cagagtccgatggagtccgatgga

SEQ ID NO: 777 - DNA, 24 bp, Artificial Sequence
  Description of Artificial Sequence: Synthetic oligonucleotide
  5' Phos
cagagtgtggaattgtgtggaatt

SEQ ID NO: 778 - DNA, 24 bp, Artificial Sequence
  Description of Artificial Sequence: Synthetic oligonucleotide
  5' Phos
cagagtgtggcagagtgtggcaga

SEQ ID NO: 779 - DNA, 24 bp, Artificial Sequence
  Description of Artificial Sequence: Synthetic oligonucleotide
  5' Phos
cagagttacggtgagttacggtga

SEQ ID NO: 780 - DNA, 24 bp, Artificial Sequence
  Description of Artificial Sequence: Synthetic oligonucleotide
  5' Phos
cagagttcgtacatgttcgtacat

SEQ ID NO: 781 - DNA, 24 bp, Artificial Sequence
  Description of Artificial Sequence: Synthetic oligonucleotide
  5' Phos
cagataaccggtaataaccggtaa

SEQ ID NO: 782 - DNA, 24 bp, Artificial Sequence
  Description of Artificial Sequence: Synthetic oligonucleotide
  5' Phos
cagatacagagtcatacagagtca

SEQ ID NO: 783 - DNA, 24 bp, Artificial Sequence
  Description of Artificial Sequence: Synthetic oligonucleotide
  5' Phos
cagataccgagatataccgagata

SEQ ID NO: 784 - DNA, 24 bp, Artificial Sequence
  Description of Artificial Sequence: Synthetic oligonucleotide
  5' Phos
cagatacgcatcgctacgcatcgc

SEQ ID NO: 785 - DNA, 24 bp, Artificial Sequence
  Description of Artificial Sequence: Synthetic oligonucleotide
  5' Phos
cagatacgcgcttgtacgcgcttg

SEQ ID NO: 786 - DNA, 24 bp, Artificial Sequence
  Description of Artificial Sequence: Synthetic oligonucleotide
  5' Phos
cagatagacttcactagacttcac

SEQ ID NO: 787 - DNA, 24 bp, Artificial Sequence
  Description of Artificial Sequence: Synthetic oligonucleotide
  5' Phos
cagatatcgcttagtatcgcttag

SEQ ID NO: 788 - DNA, 24 bp, Artificial Sequence
  Description of Artificial Sequence: Synthetic oligonucleotide
  5' Phos
cagatcacgatccgtcacgatccg

SEQ ID NO: 789 - DNA, 24 bp, Artificial Sequence
  Description of Artificial Sequence: Synthetic oligonucleotide
  5' Phos
cagatcagcttcgctcagcttcgc

SEQ ID NO: 790 - DNA, 24 bp, Artificial Sequence
  Description of Artificial Sequence: Synthetic oligonucleotide
  5' Phos
cagatccggacttctccggacttc

SEQ ID NO: 791 - DNA, 24 bp, Artificial Sequence
  Description of Artificial Sequence: Synthetic oligonucleotide
  5' Phos
cagatccggtatggtccggtatgg

SEQ ID NO: 792 - DNA, 24 bp, Artificial Sequence
  Description of Artificial Sequence: Synthetic oligonucleotide
  5' Phos
cagatccgtggtgatccgtggtga

SEQ ID NO: 793 - DNA, 24 bp, Artificial Sequence
  Description of Artificial Sequence: Synthetic oligonucleotide
  5' Phos
cagatcctcatccatcctcatcca

SEQ ID NO: 794 - DNA, 24 bp, Artificial Sequence
  Description of Artificial Sequence: Synthetic oligonucleotide
  5' Phos
cagatccttctggatccttctgga

SEQ ID NO: 795 - DNA, 24 bp, Artificial Sequence
  Description of Artificial Sequence: Synthetic oligonucleotide
  5' Phos
cagatcgctgttgctcgctgttgc

SEQ ID NO: 796 - DNA, 24 bp, Artificial Sequence
  Description of Artificial Sequence: Synthetic oligonucleotide
  5' Phos
cagatcggagcttgtcggagcttg

SEQ ID NO: 797 - DNA, 24 bp, Artificial Sequence
  Description of Artificial Sequence: Synthetic oligonucleotide
  5' Phos
cagatcggcatgagtcggcatgag

SEQ ID NO: 798 - DNA, 24 bp, Artificial Sequence
  Description of Artificial Sequence: Synthetic oligonucleotide
  5' Phos
cagatcggtggaactcggtggaac

SEQ ID NO: 799 - DNA, 24 bp, Artificial Sequence
  Description of Artificial Sequence: Synthetic oligonucleotide
  5' Phos
cagatcggttgtaatcggttgtaa

SEQ ID NO: 800 - DNA, 24 bp, Artificial Sequence
  Description of Artificial Sequence: Synthetic oligonucleotide
  5' Phos
cagatcgtgtggcatcgtgtggca

SEQ ID NO: 801 - DNA, 24 bp, Artificial Sequence
  Description of Artificial Sequence: Synthetic oligonucleotide
  5' Phos
cagatctgttccgctctgttccgc

SEQ ID NO: 802 - DNA, 24 bp, Artificial Sequence
  Description of Artificial Sequence: Synthetic oligonucleotide
  5' Phos
cagatcttggcgtctcttggcgtc

SEQ ID NO: 803 - DNA, 24 bp, Artificial Sequence
  Description of Artificial Sequence: Synthetic oligonucleotide
  5' Phos
cagatgattgagtctgattgagtc

SEQ ID NO: 804 - DNA, 24 bp, Artificial Sequence
  Description of Artificial Sequence: Synthetic oligonucleotide
  5' Phos
cagatgcgttggcatgcgttggca

SEQ ID NO: 805 - DNA, 24 bp, Artificial Sequence
  Description of Artificial Sequence: Synthetic oligonucleotide
  5' Phos
cagatggacatgcgtggacatgcg

SEQ ID NO: 806 - DNA, 24 bp, Artificial Sequence
  Description of Artificial Sequence: Synthetic oligonucleotide
  5' Phos
cagatggcaagccatggcaagcca

SEQ ID NO: 807 - DNA, 24 bp, Artificial Sequence
  Description of Artificial Sequence: Synthetic oligonucleotide
  5' Phos
cagatggttaactgtggttaactg

SEQ ID NO: 808 - DNA, 24 bp, Artificial Sequence
  Description of Artificial Sequence: Synthetic oligonucleotide
  5' Phos
cagatgtacctgagtgtacctgag

SEQ ID NO: 809 - DNA, 24 bp, Artificial Sequence
  Description of Artificial Sequence: Synthetic oligonucleotide
  5' Phos
cagatgtactacagtgtactacag

SEQ ID NO: 810 - DNA, 24 bp, Artificial Sequence
  Description of Artificial Sequence: Synthetic oligonucleotide
  5' Phos
cagatgtcggttgctgtcggttgc

SEQ ID NO: 811 - DNA, 24 bp, Artificial Sequence
  Description of Artificial Sequence: Synthetic oligonucleotide
  5' Phos
cagatgtctgtcggtgtctgtcgg

SEQ ID NO: 812 - DNA, 24 bp, Artificial Sequence
  Description of Artificial Sequence: Synthetic oligonucleotide
  5' Phos
cagatgtgactatctgtgactatc

SEQ ID NO: 813 - DNA, 24 bp, Artificial Sequence
  Description of Artificial Sequence: Synthetic oligonucleotide
  5' Phos
cagatgtgagtgcgtgtgagtgcg

SEQ ID NO: 814 - DNA, 24 bp, Artificial Sequence
  Description of Artificial Sequence: Synthetic oligonucleotide
  5' Phos
cagatgtggttcgctgtggttcgc

SEQ ID NO: 815 - DNA, 24 bp, Artificial Sequence
  Description of Artificial Sequence: Synthetic oligonucleotide
  5' Phos
cagatgttctctactgttctctac

SEQ ID NO: 816 - DNA, 24 bp, Artificial Sequence
  Description of Artificial Sequence: Synthetic oligonucleotide
  5' Phos
cagattagccagtcttagccagtc

SEQ ID NO: 817 - DNA, 24 bp, Artificial Sequence
  Description of Artificial Sequence: Synthetic oligonucleotide
  5' Phos
cagattcgcgaatattcgcgaata

SEQ ID NO: 818 - DNA, 24 bp, Artificial Sequence
  Description of Artificial Sequence: Synthetic oligonucleotide
  5' Phos
cagattcgcggtacttcgcggtac

SEQ ID NO: 819 - DNA, 24 bp, Artificial Sequence
  Description of Artificial Sequence: Synthetic oligonucleotide
  5' Phos
cagattctatgcagttctatgcag

SEQ ID NO: 820 - DNA, 24 bp, Artificial Sequence
  Description of Artificial Sequence: Synthetic oligonucleotide
  5' Phos
cagattcttaccgattcttaccga

SEQ ID NO: 821 - DNA, 24 bp, Artificial Sequence
  Description of Artificial Sequence: Synthetic oligonucleotide
  5' Phos
cagattgctctggattgctctgga

SEQ ID NO: 822 - DNA, 24 bp, Artificial Sequence
  Description of Artificial Sequence: Synthetic oligonucleotide
  5' Phos
cagattgtaacaccttgtaacacc

SEQ ID NO: 823 - DNA, 24 bp, Artificial Sequence
  Description of Artificial Sequence: Synthetic oligonucleotide
  5' Phos
cagaaacaagttccaacaagttcc

SEQ ID NO: 824 - DNA, 24 bp, Artificial Sequence
  Description of Artificial Sequence: Synthetic oligonucleotide
  5' Phos
cagaaacagcacgcaacagcacgc

SEQ ID NO: 825 - DNA, 24 bp, Artificial Sequence
  Description of Artificial Sequence: Synthetic oligonucleotide
  5' Phos
cagaaacgtgcggtaacgtgcggt

SEQ ID NO: 826 - DNA, 24 bp, Artificial Sequence
  Description of Artificial Sequence: Synthetic oligonucleotide
  5' Phos
cagaaagagcgatgaagagcgatg

SEQ ID NO: 827 - DNA, 24 bp, Artificial Sequence
  Description of Artificial Sequence: Synthetic oligonucleotide
  5' Phos
cagaaaggaattccaaggaattcc

SEQ ID NO: 828 - DNA, 24 bp, Artificial Sequence
  Description of Artificial Sequence: Synthetic oligonucleotide
  5' Phos
cagaaagtgaggcgaagtgaggcg

SEQ ID NO: 829 - DNA, 24 bp, Artificial Sequence
  Description of Artificial Sequence: Synthetic oligonucleotide
  5' Phos
cagaaatacgcgataatacgcgat

SEQ ID NO: 830 - DNA, 24 bp, Artificial Sequence
  Description of Artificial Sequence: Synthetic oligonucleotide
  5' Phos
cagaaataggttggaataggttgg

SEQ ID NO: 831 - DNA, 24 bp, Artificial Sequence
  Description of Artificial Sequence: Synthetic oligonucleotide
  5' Phos
cagaaatcgaagctaatcgaagct

SEQ ID NO: 832 - DNA, 24 bp, Artificial Sequence
  Description of Artificial Sequence: Synthetic oligonucleotide
  5' Phos
cagaacactacgatacactacgat

SEQ ID NO: 833 - DNA, 24 bp, Artificial Sequence
  Description of Artificial Sequence: Synthetic oligonucleotide
  5' Phos
cagaacactcagccacactcagcc

SEQ ID NO: 834 - DNA, 24 bp, Artificial Sequence
  Description of Artificial Sequence: Synthetic oligonucleotide
  5' Phos
cagaacatcgagccacatcgagcc

SEQ ID NO: 835 - DNA, 24 bp, Artificial Sequence
  Description of Artificial Sequence: Synthetic oligonucleotide
  5' Phos
cagaacattatgcgacattatgcg

SEQ ID NO: 836 - DNA, 24 bp, Artificial Sequence
  Description of Artificial Sequence: Synthetic oligonucleotide
  5' Phos
cagaaccagcaactaccagcaact

SEQ ID NO: 837 - DNA, 24 bp, Artificial Sequence
  Description of Artificial Sequence: Synthetic oligonucleotide
  5' Phos
cagaaccgaacacgaccgaacacg

SEQ ID NO: 838 - DNA, 24 bp, Artificial Sequence
  Description of Artificial Sequence: Synthetic oligonucleotide
  5' Phos
cagaaccgaacggtaccgaacggt

SEQ ID NO: 839 - DNA, 24 bp, Artificial Sequence
  Description of Artificial Sequence: Synthetic oligonucleotide
  5' Phos
cagaacgagtggctacgagtggct

SEQ ID NO: 840 - DNA, 24 bp, Artificial Sequence
  Description of Artificial Sequence: Synthetic oligonucleotide
  5' Phos
cagaacggttacggacggttacgg

SEQ ID NO: 841 - DNA, 24 bp, Artificial Sequence
  Description of Artificial Sequence: Synthetic oligonucleotide
  5' Phos
cagaacgtaagcgcacgtaagcgc

SEQ ID NO: 842 - DNA, 24 bp, Artificial Sequence
  Description of Artificial Sequence: Synthetic oligonucleotide
  5' Phos
cagaactatgtgctactatgtgct

SEQ ID NO: 843 - DNA, 24 bp, Artificial Sequence
  Description of Artificial Sequence: Synthetic oligonucleotide
  5' Phos
cagaactggagtccactggagtcc

SEQ ID NO: 844 - DNA, 24 bp, Artificial Sequence
  Description of Artificial Sequence: Synthetic oligonucleotide
  5' Phos
cagaactgtacttcactgtacttc

SEQ ID NO: 845 - DNA, 24 bp, Artificial Sequence
  Description of Artificial Sequence: Synthetic oligonucleotide
  5' Phos
cagaagaagtctgcagaagtctgc

SEQ ID NO: 846 - DNA, 24 bp, Artificial Sequence
  Description of Artificial Sequence: Synthetic oligonucleotide
  5' Phos
cagaagacgcgagtagacgcgagt

SEQ ID NO: 847 - DNA, 24 bp, Artificial Sequence
  Description of Artificial Sequence: Synthetic oligonucleotide
  5' Phos
cagaagactgtgctagactgtgct

SEQ ID NO: 848 - DNA, 24 bp, Artificial Sequence
  Description of Artificial Sequence: Synthetic oligonucleotide
  5' Phos
cagaagagtacgccagagtacgcc

SEQ ID NO: 849 - DNA, 24 bp, Artificial Sequence
  Description of Artificial Sequence: Synthetic oligonucleotide
  5' Phos
cagaagatcgactgagatcgactg

SEQ ID NO: 850 - DNA, 24 bp, Artificial Sequence
  Description of Artificial Sequence: Synthetic oligonucleotide
  5' Phos
cagaagattcggccagattcggcc

SEQ ID NO: 851 - DNA, 24 bp, Artificial Sequence
  Description of Artificial Sequence: Synthetic oligonucleotide
  5' Phos
cagaagcaagtgctagcaagtgct

SEQ ID NO: 852 - DNA, 24 bp, Artificial Sequence
  Description of Artificial Sequence: Synthetic oligonucleotide
  5' Phos
cagaagccattgcgagccattgcg

SEQ ID NO: 853 - DNA, 24 bp, Artificial Sequence
  Description of Artificial Sequence: Synthetic oligonucleotide
  5' Phos
cagaagcggacagtagcggacagt

SEQ ID NO: 854 - DNA, 24 bp, Artificial Sequence
  Description of Artificial Sequence: Synthetic oligonucleotide
  5' Phos
cagaagcgtaagcgagcgtaagcg

SEQ ID NO: 855 - DNA, 24 bp, Artificial Sequence
  Description of Artificial Sequence: Synthetic oligonucleotide
  5' Phos
cagaagctattctcagctattctc

SEQ ID NO: 856 - DNA, 24 bp, Artificial Sequence
  Description of Artificial Sequence: Synthetic oligonucleotide
  5' Phos
cagaagcttatacgagcttatacg

SEQ ID NO: 857 - DNA, 24 bp, Artificial Sequence
  Description of Artificial Sequence: Synthetic oligonucleotide
  5' Phos
cagaaggacagatgaggacagatg

SEQ ID NO: 858 - DNA, 24 bp, Artificial Sequence
  Description of Artificial Sequence: Synthetic oligonucleotide
  5' Phos
cagaaggatcagataggatcagat

SEQ ID NO: 859 - DNA, 24 bp, Artificial Sequence
  Description of Artificial Sequence: Synthetic oligonucleotide
  5' Phos
cagaaggctgaaggaggctgaagg

SEQ ID NO: 860 - DNA, 24 bp, Artificial Sequence
  Description of Artificial Sequence: Synthetic oligonucleotide
  5' Phos
cagaaggtacgaggaggtacgagg

SEQ ID NO: 861 - DNA, 24 bp, Artificial Sequence
  Description of Artificial Sequence: Synthetic oligonucleotide
  5' Phos
cagaaggtaggctcaggtaggctc

SEQ ID NO: 862 - DNA, 24 bp, Artificial Sequence
  Description of Artificial Sequence: Synthetic oligonucleotide
  5' Phos
cagaaggtgaacggaggtgaacgg

SEQ ID NO: 863 - DNA, 24 bp, Artificial Sequence
  Description of Artificial Sequence: Synthetic oligonucleotide
  5' Phos
cagaaggtgccaataggtgccaat

SEQ ID NO: 864 - DNA, 24 bp, Artificial Sequence
  Description of Artificial Sequence: Synthetic oligonucleotide
  5' Phos
cagaaggttcaacgaggttcaacg

SEQ ID NO: 865 - DNA, 24 bp, Artificial Sequence
  Description of Artificial Sequence: Synthetic oligonucleotide
  5' Phos
cagaagtcactcgcagtcactcgc

SEQ ID NO: 866 - DNA, 24 bp, Artificial Sequence
  Description of Artificial Sequence: Synthetic oligonucleotide
  5' Phos
cagaagtcgtggtgagtcgtggtg

SEQ ID NO: 867 - DNA, 24 bp, Artificial Sequence
  Description of Artificial Sequence: Synthetic oligonucleotide
  5' Phos
cagaagtggaggagagtggaggag

SEQ ID NO: 868 - DNA, 24 bp, Artificial Sequence
  Description of Artificial Sequence: Synthetic oligonucleotide
  5' Phos
cagaagttgagcgcagttgagcgc

SEQ ID NO: 869 - DNA, 24 bp, Artificial Sequence
  Description of Artificial Sequence: Synthetic oligonucleotide
  5' Phos
cagaagttgatggtagttgatggt

SEQ ID NO: 870 - DNA, 24 bp, Artificial Sequence
  Description of Artificial Sequence: Synthetic oligonucleotide
  5' Phos
cagaataacacagcataacacagc

SEQ ID NO: 871 - DNA, 24 bp, Artificial Sequence
  Description of Artificial Sequence: Synthetic oligonucleotide
  5' Phos
cagaataaggtccgataaggtccg

SEQ ID NO: 872 - DNA, 24 bp, Artificial Sequence
  Description of Artificial Sequence: Synthetic oligonucleotide
  5' Phos
cagaatacagtcagatacagtcag

SEQ ID NO: 873 - DNA, 24 bp, Artificial Sequence
  Description of Artificial Sequence: Synthetic oligonucleotide
  5' Phos
cagaataccggcctataccggcct

SEQ ID NO: 874 - DNA, 24 bp, Artificial Sequence
  Description of Artificial Sequence: Synthetic oligonucleotide
  5' Phos
cagaatagcaggatatagcaggat

SEQ ID NO: 875 - DNA, 24 bp, Artificial Sequence
  Description of Artificial Sequence: Synthetic oligonucleotide
  5' Phos
cagaatagcgttacatagcgttac

SEQ ID NO: 876 - DNA, 24 bp, Artificial Sequence
  Description of Artificial Sequence: Synthetic oligonucleotide
  5' Phos
cagaatagtccaacatagtccaac

SEQ ID NO: 877 - DNA, 24 bp, Artificial Sequence
  Description of Artificial Sequence: Synthetic oligonucleotide
  5' Phos
cagaatatcggcggatatcggcgg

SEQ ID NO: 878 - DNA, 24 bp, Artificial Sequence
  Description of Artificial Sequence: Synthetic oligonucleotide
  5' Phos
cagaatccgtgatgatccgtgatg

SEQ ID NO: 879 - DNA, 24 bp, Artificial Sequence
  Description of Artificial Sequence: Synthetic oligonucleotide
  5' Phos
cagaatcgtaccggatcgtaccgg

SEQ ID NO: 880 - DNA, 24 bp, Artificial Sequence
  Description of Artificial Sequence: Synthetic oligonucleotide
  5' Phos
cagaatcgttactgatcgttactg

SEQ ID NO: 881 - DNA, 24 bp, Artificial Sequence
  Description of Artificial Sequence: Synthetic oligonucleotide
  5' Phos
cagaatgaagatgcatgaagatgc

SEQ ID NO: 882 - DNA, 24 bp, Artificial Sequence
  Description of Artificial Sequence: Synthetic oligonucleotide
  5' Phos
cagaatggcgtggtatggcgtggt

SEQ ID NO: 883 - DNA, 24 bp, Artificial Sequence
  Description of Artificial Sequence: Synthetic oligonucleotide
  5' Phos
cagaatgttgagcgatgttgagcg

SEQ ID NO: 884 - DNA, 24 bp, Artificial Sequence
  Description of Artificial Sequence: Synthetic oligonucleotide
  5' Phos
cagaattagctgtcattagctgtc

SEQ ID NO: 885 - DNA, 24 bp, Artificial Sequence
  Description of Artificial Sequence: Synthetic oligonucleotide
  5' Phos
cagaattcgcgtgcattcgcgtgc

SEQ ID NO: 886 - DNA, 24 bp, Artificial Sequence
  Description of Artificial Sequence: Synthetic oligonucleotide
  5' Phos
cagaattgcgctccattgcgctcc

SEQ ID NO: 887 - DNA, 24 bp, Artificial Sequence
  Description of Artificial Sequence: Synthetic oligonucleotide
  5' Phos
cagaattgtgttgcattgtgttgc

SEQ ID NO: 888 - DNA, 24 bp, Artificial Sequence
  Description of Artificial Sequence: Synthetic oligonucleotide
  5' Phos
cagacaagacgaatcaagacgaat

SEQ ID NO: 889 - DNA, 24 bp, Artificial Sequence
  Description of Artificial Sequence: Synthetic oligonucleotide
  5' Phos
cagacacgcactgtcacgcactgt

SEQ ID NO: 890 - DNA, 24 bp, Artificial Sequence
  Description of Artificial Sequence: Synthetic oligonucleotide
  5' Phos
cagacacggagtagcacggagtag

SEQ ID NO: 891 - DNA, 24 bp, Artificial Sequence
  Description of Artificial Sequence: Synthetic oligonucleotide
  5' Phos
cagacacggtatcgcacggtatcg

SEQ ID NO: 892 - DNA, 24 bp, Artificial Sequence
  Description of Artificial Sequence: Synthetic oligonucleotide
  5' Phos
cagacactcggattcactcggatt

SEQ ID NO: 893 - DNA, 24 bp, Artificial Sequence
  Description of Artificial Sequence: Synthetic oligonucleotide
  5' Phos
cagacacttgagtacacttgagta

SEQ ID NO: 894 - DNA, 24 bp, Artificial Sequence
  Description of Artificial Sequence: Synthetic oligonucleotide
  5' Phos
cagacagcctcagtcagcctcagt

SEQ ID NO: 895 - DNA, 24 bp, Artificial Sequence
  Description of Artificial Sequence: Synthetic oligonucleotide
  5' Phos
cagacagctccaagcagctccaag

SEQ ID NO: 896 - DNA, 24 bp, Artificial Sequence
  Description of Artificial Sequence: Synthetic oligonucleotide
  5' Phos
cagacatcgaggagcatcgaggag

SEQ ID NO: 897 - DNA, 24 bp, Artificial Sequence
  Description of Artificial Sequence: Synthetic oligonucleotide
  5' Phos
cagacattggccgtcattggccgt

SEQ ID NO: 898 - DNA, 24 bp, Artificial Sequence
  Description of Artificial Sequence: Synthetic oligonucleotide
  5' Phos
cagaccagaactggccagaactgg

SEQ ID NO: 899 - DNA, 24 bp, Artificial Sequence
  Description of Artificial Sequence: Synthetic oligonucleotide
  5' Phos
cagaccagatacggccagatacgg

SEQ ID NO: 900 - DNA, 24 bp, Artificial Sequence
  Description of Artificial Sequence: Synthetic oligonucleotide
  5' Phos
cagaccaggatccaccaggatcca

SEQ ID NO: 901 - DNA, 24 bp, Artificial Sequence
  Description of Artificial Sequence: Synthetic oligonucleotide
  5' Phos
cagaccaggatgttccaggatgtt

SEQ ID NO: 902 - DNA, 24 bp, Artificial Sequence
  Description of Artificial Sequence: Synthetic oligonucleotide
  5' Phos
cagaccgagcatgtccgagcatgt

SEQ ID NO: 903 - DNA, 24 bp, Artificial Sequence
  Description of Artificial Sequence: Synthetic oligonucleotide
  5' Phos
cagaccggagtgttccggagtgtt

SEQ ID NO: 904 - DNA, 24 bp, Artificial Sequence
  Description of Artificial Sequence: Synthetic oligonucleotide
  5' Phos
cagaccggtaccatccggtaccat

SEQ ID NO: 905 - DNA, 24 bp, Artificial Sequence
  Description of Artificial Sequence: Synthetic oligonucleotide
  5' Phos
cagaccgtctaaggccgtctaagg

SEQ ID NO: 906 - DNA, 24 bp, Artificial Sequence
  Description of Artificial Sequence: Synthetic oligonucleotide
  5' Phos
cagacctccattaacctccattaa

SEQ ID NO: 907 - DNA, 24 bp, Artificial Sequence
  Description of Artificial Sequence: Synthetic oligonucleotide
  5' Phos
cagacctcctgactcctcctgact

SEQ ID NO: 908 - DNA, 24 bp, Artificial Sequence
  Description of Artificial Sequence: Synthetic oligonucleotide
  5' Phos
cagacctctgctctcctctgctct

SEQ ID NO: 909 - DNA, 24 bp, Artificial Sequence
  Description of Artificial Sequence: Synthetic oligonucleotide
  5' Phos
cagacctgccttgtcctgccttgt

SEQ ID NO: 910 - DNA, 24 bp, Artificial Sequence
  Description of Artificial Sequence: Synthetic oligonucleotide
  5' Phos
cagacctggccattcctggccatt

SEQ ID NO: 911 - DNA, 24 bp, Artificial Sequence
  Description of Artificial Sequence: Synthetic oligonucleotide
  5' Phos
cagaccttaacgcgccttaacgcg

SEQ ID NO: 912 - DNA, 24 bp, Artificial Sequence
  Description of Artificial Sequence: Synthetic oligonucleotide
  5' Phos
cagacgacctgtctcgacctgtct

SEQ ID NO: 913 - DNA, 24 bp, Artificial Sequence
  Description of Artificial Sequence: Synthetic oligonucleotide
  5' Phos
cagacgcgttacgtcgcgttacgt

SEQ ID NO: 914 - DNA, 24 bp, Artificial Sequence
  Description of Artificial Sequence: Synthetic oligonucleotide
  5' Phos
cagacggcagttcacggcagttca

SEQ ID NO: 915 - DNA, 24 bp, Artificial Sequence
  Description of Artificial Sequence: Synthetic oligonucleotide
  5' Phos
cagacggccattagcggccattag

SEQ ID NO: 916 - DNA, 24 bp, Artificial Sequence
  Description of Artificial Sequence: Synthetic oligonucleotide
  5' Phos
cagacgtattgcatcgtattgcat

SEQ ID NO: 917 - DNA, 24 bp, Artificial Sequence
  Description of Artificial Sequence: Synthetic oligonucleotide
  5' Phos
cagactacgaccgtctacgaccgt

SEQ ID NO: 918 - DNA, 24 bp, Artificial Sequence
  Description of Artificial Sequence: Synthetic oligonucleotide
  5' Phos
cagactaggaaggtctaggaaggt

SEQ ID NO: 919 - DNA, 24 bp, Artificial Sequence
  Description of Artificial Sequence: Synthetic oligonucleotide
  5' Phos
cagactagtcctgtctagtcctgt

SEQ ID NO: 920 - DNA, 24 bp, Artificial Sequence
  Description of Artificial Sequence: Synthetic oligonucleotide
  5' Phos
cagactagtggaggctagtggagg

SEQ ID NO: 921 - DNA, 24 bp, Artificial Sequence
  Description of Artificial Sequence: Synthetic oligonucleotide
  5' Phos
cagactcgcagagtctcgcagagt

SEQ ID NO: 922 - DNA, 24 bp, Artificial Sequence
  Description of Artificial Sequence: Synthetic oligonucleotide
  5' Phos
cagactcgcttcgtctcgcttcgt

SEQ ID NO: 923 - DNA, 24 bp, Artificial Sequence
  Description of Artificial Sequence: Synthetic oligonucleotide
  5' Phos
cagactcgttagcgctcgttagcg

SEQ ID NO: 924 - DNA, 24 bp, Artificial Sequence
  Description of Artificial Sequence: Synthetic oligonucleotide
  5' Phos
cagactcttccaagctcttccaag

SEQ ID NO: 925 - DNA, 24 bp, Artificial Sequence
  Description of Artificial Sequence: Synthetic oligonucleotide
  5' Phos
cagactgcttcaatctgcttcaat

SEQ ID NO: 926 - DNA, 24 bp, Artificial Sequence
  Description of Artificial Sequence: Synthetic oligonucleotide
  5' Phos
cagactggtatcaactggtatcaa

SEQ ID NO: 927 - DNA, 24 bp, Artificial Sequence
  Description of Artificial Sequence: Synthetic oligonucleotide
  5' Phos
cagactgtcttcggctgtcttcgg

SEQ ID NO: 928 - DNA, 24 bp, Artificial Sequence
  Description of Artificial Sequence: Synthetic oligonucleotide
  5' Phos
cagacttcatgacgcttcatgacg

SEQ ID NO: 929 - DNA, 24 bp, Artificial Sequence
  Description of Artificial Sequence: Synthetic oligonucleotide
  5' Phos
cagacttcggcagtcttcggcagt

SEQ ID NO: 930 - DNA, 24 bp, Artificial Sequence
  Description of Artificial Sequence: Synthetic oligonucleotide
  5' Phos
cagacttgaccggtcttgaccggt

SEQ ID NO: 931 - DNA, 24 bp, Artificial Sequence
  Description of Artificial Sequence: Synthetic oligonucleotide
  5' Phos
cagacttgcctattcttgcctatt

SEQ ID NO: 932 - DNA, 24 bp, Artificial Sequence
  Description of Artificial Sequence: Synthetic oligonucleotide
  5' Phos
cagagaacttgtgagaacttgtga

SEQ ID NO: 933 - DNA, 24 bp, Artificial Sequence
  Description of Artificial Sequence: Synthetic oligonucleotide
  5' Phos
cagagaagcattctgaagcattct

SEQ ID NO: 934 - DNA, 24 bp, Artificial Sequence
  Description of Artificial Sequence: Synthetic oligonucleotide
  5' Phos
cagagaatccattcgaatccattc

SEQ ID NO: 935 - DNA, 24 bp, Artificial Sequence
  Description of Artificial Sequence: Synthetic oligonucleotide
  5' Phos
cagagacgcctgttgacgcctgtt

SEQ ID NO: 936 - DNA, 24 bp, Artificial Sequence
  Description of Artificial Sequence: Synthetic oligonucleotide
  5' Phos
cagagacgtaggacgacgtaggac

SEQ ID NO: 937 - DNA, 24 bp, Artificial Sequence
  Description of Artificial Sequence: Synthetic oligonucleotide
  5' Phos
cagagactaatggtgactaatggt

SEQ ID NO: 938 - DNA, 24 bp, Artificial Sequence
  Description of Artificial Sequence: Synthetic oligonucleotide
  5' Phos
cagagagcctccttgagcctcctt

SEQ ID NO: 939 - DNA, 24 bp, Artificial Sequence
  Description of Artificial Sequence: Synthetic oligonucleotide
  5' Phos
cagagagcgtctacgagcgtctac

SEQ ID NO: 940 - DNA, 24 bp, Artificial Sequence
  Description of Artificial Sequence: Synthetic oligonucleotide
  5' Phos
cagagaggataggcgaggataggc

SEQ ID NO: 941 - DNA, 24 bp, Artificial Sequence
  Description of Artificial Sequence: Synthetic oligonucleotide
  5' Phos
cagagagtgccatcgagtgccatc

SEQ ID NO: 942 - DNA, 24 bp, Artificial Sequence
  Description of Artificial Sequence: Synthetic oligonucleotide
  5' Phos
cagagagtggatctgagtggatct

SEQ ID NO: 943 - DNA, 24 bp, Artificial Sequence
  Description of Artificial Sequence: Synthetic oligonucleotide
  5' Phos
cagagagtggtagcgagtggtagc

SEQ ID NO: 944 - DNA, 24 bp, Artificial Sequence
  Description of Artificial Sequence: Synthetic oligonucleotide
  5' Phos
cagagagttagagagagttagaga

SEQ ID NO: 945 - DNA, 24 bp, Artificial Sequence
  Description of Artificial Sequence: Synthetic oligonucleotide
  5' Phos
cagagcacatctgcgcacatctgc

SEQ ID NO: 946 - DNA, 24 bp, Artificial Sequence
  Description of Artificial Sequence: Synthetic oligonucleotide
  5' Phos
cagagcaccattacgcaccattac

SEQ ID NO: 947 - DNA, 24 bp, Artificial Sequence
  Description of Artificial Sequence: Synthetic oligonucleotide
  5' Phos
cagagcagcctattgcagcctatt

SEQ ID NO: 948 - DNA, 24 bp, Artificial Sequence
  Description of Artificial Sequence: Synthetic oligonucleotide
  5' Phos
cagagcagtatcaagcagtatcaa

SEQ ID NO: 949 - DNA, 24 bp, Artificial Sequence
  Description of Artificial Sequence: Synthetic oligonucleotide
  5' Phos
cagagccgtcgttagccgtcgtta

SEQ ID NO: 950 - DNA, 24 bp, Artificial Sequence
  Description of Artificial Sequence: Synthetic oligonucleotide
  5' Phos
cagagcctgagctagcctgagcta

SEQ ID NO: 951 - DNA, 24 bp, Artificial Sequence
  Description of Artificial Sequence: Synthetic oligonucleotide
  5' Phos
cagagcgcaagcaagcgcaagcaa

SEQ ID NO: 952 - DNA, 24 bp, Artificial Sequence
  Description of Artificial Sequence: Synthetic oligonucleotide
  5' Phos
cagagcgttacgacgcgttacgac

SEQ ID NO: 953 - DNA, 24 bp, Artificial Sequence
  Description of Artificial Sequence: Synthetic oligonucleotide
  5' Phos
cagagcgttggatcgcgttggatc

SEQ ID NO: 954 - DNA, 24 bp, Artificial Sequence
  Description of Artificial Sequence: Synthetic oligonucleotide
  5' Phos
cagagctagtcgcagctagtcgca

SEQ ID NO: 955 - DNA, 24 bp, Artificial Sequence
  Description of Artificial Sequence: Synthetic oligonucleotide
  5' Phos
cagagctcactaccgctcactacc

SEQ ID NO: 956 - DNA, 24 bp, Artificial Sequence
  Description of Artificial Sequence: Synthetic oligonucleotide
  5' Phos
cagagctcgaattagctcgaatta

SEQ ID NO: 957 - DNA, 24 bp, Artificial Sequence
  Description of Artificial Sequence: Synthetic oligonucleotide
  5' Phos
cagagctcgattccgctcgattcc

SEQ ID NO: 958 - DNA, 24 bp, Artificial Sequence
  Description of Artificial Sequence: Synthetic oligonucleotide
  5' Phos
cagagctgaggatcgctgaggatc

SEQ ID NO: 959 - DNA, 24 bp, Artificial Sequence
  Description of Artificial Sequence: Synthetic oligonucleotide
  5' Phos
cagagcttcattctgcttcattct

SEQ ID NO: 960 - DNA, 24 bp, Artificial Sequence
  Description of Artificial Sequence: Synthetic oligonucleotide
  5' Phos
cagagcttgctattgcttgctatt

SEQ ID NO: 961 - DNA, 24 bp, Artificial Sequence
  Description of Artificial Sequence: Synthetic oligonucleotide
  5' Phos
ttcggcttggttgcgcttggttgc

SEQ ID NO: 962 - DNA, 24 bp, Artificial Sequence
  Description of Artificial Sequence: Synthetic oligonucleotide
  5' Phos
ttcgggagtggttcggagtggttc

SEQ ID NO: 963 - DNA, 24 bp, Artificial Sequence
  Description of Artificial Sequence: Synthetic oligonucleotide
  5' Phos
ttcgggataataccggataatacc

SEQ ID NO: 964 - DNA, 24 bp, Artificial Sequence
  Description of Artificial Sequence: Synthetic oligonucleotide
  5' Phos
ttcgggatcgtggtggatcgtggt

SEQ ID NO: 965 - DNA, 24 bp, Artificial Sequence
  Description of Artificial Sequence: Synthetic oligonucleotide
  5' Phos
ttcgggatgattgtggatgattgt

SEQ ID NO: 966 - DNA, 24 bp, Artificial Sequence
  Description of Artificial Sequence: Synthetic oligonucleotide
  5' Phos
ttcgggatgcgttcggatgcgttc

SEQ ID NO: 967 - DNA, 24 bp, Artificial Sequence
  Description of Artificial Sequence: Synthetic oligonucleotide
  5' Phos
ttcgggcgaatgtcggcgaatgtc

SEQ ID NO: 968 - DNA, 24 bp, Artificial Sequence
  Description of Artificial Sequence: Synthetic oligonucleotide
  5' Phos
ttcgggcgattggtggcgattggt

SEQ ID NO: 969 - DNA, 24 bp, Artificial Sequence
  Description of Artificial Sequence: Synthetic oligonucleotide
  5' Phos
ttcgggcggtatcaggcggtatca

SEQ ID NO: 970 - DNA, 24 bp, Artificial Sequence
  Description of Artificial Sequence: Synthetic oligonucleotide
  5' Phos
ttcgggctatccacggctatccac

SEQ ID NO: 971 - DNA, 24 bp, Artificial Sequence
  Description of Artificial Sequence: Synthetic oligonucleotide
  5' Phos
ttcgggctattacaggctattaca

SEQ ID NO: 972 - DNA, 24 bp, Artificial Sequence
  Description of Artificial Sequence: Synthetic oligonucleotide
  5' Phos
ttcgggctgaactcggctgaactc

SEQ ID NO: 973 - DNA, 24 bp, Artificial Sequence
  Description of Artificial Sequence: Synthetic oligonucleotide
  5' Phos
ttcgggtacagtcaggtacagtca

SEQ ID NO: 974 - DNA, 24 bp, Artificial Sequence
  Description of Artificial Sequence: Synthetic oligonucleotide
  5' Phos
ttcgggtcgaacctggtcgaacct

SEQ ID NO: 975 - DNA, 24 bp, Artificial Sequence
  Description of Artificial Sequence: Synthetic oligonucleotide
  5' Phos
ttcgggtctctcgtggtctctcgt

SEQ ID NO: 976 - DNA, 24 bp, Artificial Sequence
  Description of Artificial Sequence: Synthetic oligonucleotide
  5' Phos
ttcgggtgcttgtcggtgcttgtc

SEQ ID NO: 977 - DNA, 24 bp, Artificial Sequence
  Description of Artificial Sequence: Synthetic oligonucleotide
  5' Phos
ttcgggttccacttggttccactt

SEQ ID NO: 978 - DNA, 24 bp, Artificial Sequence
  Description of Artificial Sequence: Synthetic oligonucleotide
  5' Phos
ttcgggttgcatccggttgcatcc

SEQ ID NO: 979 - DNA, 24 bp, Artificial Sequence
  Description of Artificial Sequence: Synthetic oligonucleotide
  5' Phos
ttcgggttggacgtggttggacgt

SEQ ID NO: 980 - DNA, 24 bp, Artificial Sequence
  Description of Artificial Sequence: Synthetic oligonucleotide
  5' Phos
ttcggtaagagcaagtaagagcaa

SEQ ID NO: 981 - DNA, 24 bp, Artificial Sequence
  Description of Artificial Sequence: Synthetic oligonucleotide
  5' Phos
ttcggtaaggcttagtaaggctta

SEQ ID NO: 982 - DNA, 24 bp, Artificial Sequence
  Description of Artificial Sequence: Synthetic oligonucleotide
  5' Phos
ttcggtagtcctcagtagtcctca

SEQ ID NO: 983 - DNA, 24 bp, Artificial Sequence
  Description of Artificial Sequence: Synthetic oligonucleotide
  5' Phos
ttcggtccggttctgtccggttct

SEQ ID NO: 984 - DNA, 24 bp, Artificial Sequence
  Description of Artificial Sequence: Synthetic oligonucleotide
  5' Phos
ttcggtcctacagcgtcctacagc

SEQ ID NO: 985 - DNA, 24 bp, Artificial Sequence
  Description of Artificial Sequence: Synthetic oligonucleotide
  5' Phos
ttcggtcggattaagtcggattaa

SEQ ID NO: 986 - DNA, 24 bp, Artificial Sequence
  Description of Artificial Sequence: Synthetic oligonucleotide
  5' Phos
ttcggtgaacagaagtgaacagaa

SEQ ID NO: 987 - DNA, 24 bp, Artificial Sequence
  Description of Artificial Sequence: Synthetic oligonucleotide
  5' Phos
ttcggtgcctacacgtgcctacac

SEQ ID NO: 988 - DNA, 24 bp, Artificial Sequence
  Description of Artificial Sequence: Synthetic oligonucleotide
  5' Phos
ttcggtgtatcggagtgtatcgga

SEQ ID NO: 989 - DNA, 24 bp, Artificial Sequence
  Description of Artificial Sequence: Synthetic oligonucleotide
  5' Phos
ttcggtgtccatgagtgtccatga

SEQ ID NO: 990 - DNA, 24 bp, Artificial Sequence
  Description of Artificial Sequence: Synthetic oligonucleotide
  5' Phos
ttcggtgtctaatcgtgtctaatc

SEQ ID NO: 991 - DNA, 24 bp, Artificial Sequence
  Description of Artificial Sequence: Synthetic oligonucleotide
  5' Phos
ttcggtgttcctgcgtgttcctgc

SEQ ID NO: 992 - DNA, 24 bp, Artificial Sequence
  Description of Artificial Sequence: Synthetic oligonucleotide
  5' Phos
ttcggtgttctgctgtgttctgct

SEQ ID NO: 993 - DNA, 24 bp, Artificial Sequence
  Description of Artificial Sequence: Synthetic oligonucleotide
  5' Phos
ttcggttaagaggagttaagagga

SEQ ID NO: 994 - DNA, 24 bp, Artificial Sequence
  Description of Artificial Sequence: Synthetic oligonucleotide
  5' Phos
ttcggttaatgcgtgttaatgcgt

SEQ ID NO: 995 - DNA, 24 bp, Artificial Sequence
  Description of Artificial Sequence: Synthetic oligonucleotide
  5' Phos
ttcggttaggctgtgttaggctgt

SEQ ID NO: 996 - DNA, 24 bp, Artificial Sequence
  Description of Artificial Sequence: Synthetic oligonucleotide
  5' Phos
ttcggttcattggagttcattgga

SEQ ID NO: 997 - DNA, 24 bp, Artificial Sequence
  Description of Artificial Sequence: Synthetic oligonucleotide
  5' Phos
ttcggttcggaccagttcggacca

SEQ ID NO: 998 - DNA, 24 bp, Artificial Sequence
  Description of Artificial Sequence: Synthetic oligonucleotide
  5' Phos
ttcggttggccagtgttggccagt

SEQ ID NO: 999 - DNA, 24 bp, Artificial Sequence
  Description of Artificial Sequence: Synthetic oligonucleotide
  5' Phos
ttcggttggtagttgttggtagtt

SEQ ID NO: 1000 - DNA, 24 bp, Artificial Sequence
  Description of Artificial Sequence: Synthetic oligonucleotide
  5' Phos
ttcgtaacacgacataacacgaca

SEQ ID NO: 1001 - DNA, 24 bp, Artificial Sequence
  Description of Artificial Sequence: Synthetic oligonucleotide
  5' Phos
ttcgtaagagagcataagagagca

SEQ ID NO: 1002 - DNA, 24 bp, Artificial Sequence
  Description of Artificial Sequence: Synthetic oligonucleotide
  5' Phos
ttcgtaagaggcggtaagaggcgg

SEQ ID NO: 1003 - DNA, 24 bp, Artificial Sequence
  Description of Artificial Sequence: Synthetic oligonucleotide
  5' Phos
ttcgtaaggaatggtaaggaatgg

SEQ ID NO: 1004 - DNA, 24 bp, Artificial Sequence
  Description of Artificial Sequence: Synthetic oligonucleotide
  5' Phos
ttcgtaatgagcactaatgagcac

SEQ ID NO: 1005 - DNA, 24 bp, Artificial Sequence
  Description of Artificial Sequence: Synthetic oligonucleotide
  5' Phos
ttcgtacactggtctacactggtc

SEQ ID NO: 1006 - DNA, 24 bp, Artificial Sequence
  Description of Artificial Sequence: Synthetic oligonucleotide
  5' Phos
ttcgtacagcgcaatacagcgcaa

SEQ ID NO: 1007 - DNA, 24 bp, Artificial Sequence
  Description of Artificial Sequence: Synthetic oligonucleotide
  5' Phos
ttcgtacaggttagtacaggttag

SEQ ID NO: 1008 - DNA, 24 bp, Artificial Sequence
  Description of Artificial Sequence: Synthetic oligonucleotide
  5' Phos
ttcgtacattaccgtacattaccg

SEQ ID NO: 1009 - DNA, 24 bp, Artificial Sequence
  Description of Artificial Sequence: Synthetic oligonucleotide
  5' Phos
ttcgtaccaatctctaccaatctc

SEQ ID NO: 1010 - DNA, 24 bp, Artificial Sequence
  Description of Artificial Sequence: Synthetic oligonucleotide
  5' Phos
ttcgtaccggagagtaccggagag

SEQ ID NO: 1011 - DNA, 24 bp, Artificial Sequence
  Description of Artificial Sequence: Synthetic oligonucleotide
  5' Phos
ttcgtaccggcttctaccggcttc

SEQ ID NO: 1012 - DNA, 24 bp, Artificial Sequence
  Description of Artificial Sequence: Synthetic oligonucleotide
  5' Phos
ttcgtacctacatgtacctacatg

SEQ ID NO: 1013 - DNA, 24 bp, Artificial Sequence
  Description of Artificial Sequence: Synthetic oligonucleotide
  5' Phos
ttcgtacgattacgtacgattacg

SEQ ID NO: 1014 - DNA, 24 bp, Artificial Sequence
  Description of Artificial Sequence: Synthetic oligonucleotide
  5' Phos
ttcgtacgcagaggtacgcagagg

SEQ ID NO: 1015 - DNA, 24 bp, Artificial Sequence
  Description of Artificial Sequence: Synthetic oligonucleotide
  5' Phos
ttcgtactcaacgatactcaacga

SEQ ID NO: 1016 - DNA, 24 bp, Artificial Sequence
  Description of Artificial Sequence: Synthetic oligonucleotide
  5' Phos
ttcgtagaccaacctagaccaacc

SEQ ID NO: 1017 - DNA, 24 bp, Artificial Sequence
  Description of Artificial Sequence: Synthetic oligonucleotide
  5' Phos
ttcgtagacctccgtagacctccg

SEQ ID NO: 1018 - DNA, 24 bp, Artificial Sequence
  Description of Artificial Sequence: Synthetic oligonucleotide
  5' Phos
ttcgtagcagttgatagcagttga

SEQ ID NO: 1019 - DNA, 24 bp, Artificial Sequence
  Description of Artificial Sequence: Synthetic oligonucleotide
  5' Phos
ttcgtagcgcaagctagcgcaagc

SEQ ID NO: 1020 - DNA, 24 bp, Artificial Sequence
  Description of Artificial Sequence: Synthetic oligonucleotide
  5' Phos
ttcgtagctatacctagctatacc

SEQ ID NO: 1021 - DNA, 24 bp, Artificial Sequence
  Description of Artificial Sequence: Synthetic oligonucleotide
  5' Phos
ttcgtagcttgcgctagcttgcgc

SEQ ID NO: 1022 - DNA, 24 bp, Artificial Sequence
  Description of Artificial Sequence: Synthetic oligonucleotide
  5' Phos
ttcgtaggaatccataggaatcca

SEQ ID NO: 1023 - DNA, 24 bp, Artificial Sequence
  Description of Artificial Sequence: Synthetic oligonucleotide
  5' Phos
ttcgtaggccgttctaggccgttc

SEQ ID NO: 1024 - DNA, 24 bp, Artificial Sequence
  Description of Artificial Sequence: Synthetic oligonucleotide
  5' Phos
ttcgtaggtcactataggtcacta

SEQ ID NO: 1025 - DNA, 24 bp, Artificial Sequence
  Description of Artificial Sequence: Synthetic oligonucleotide
  5' Phos
ttcgtagtcgcgtctagtcgcgtc

SEQ ID NO: 1026 - DNA, 24 bp, Artificial Sequence
  Description of Artificial Sequence: Synthetic oligonucleotide
  5' Phos
ttcgtatacggctatatacggcta

SEQ ID NO: 1027 - DNA, 24 bp, Artificial Sequence
  Description of Artificial Sequence: Synthetic oligonucleotide
  5' Phos
ttcgtatcgcggcatatcgcggca

SEQ ID NO: 1028 - DNA, 24 bp, Artificial Sequence
  Description of Artificial Sequence: Synthetic oligonucleotide
  5' Phos
ttcgtatggagcaatatggagcaa

SEQ ID NO: 1029 - DNA, 24 bp, Artificial Sequence
  Description of Artificial Sequence: Synthetic oligonucleotide
  5' Phos
ttcgtatggcgtggtatggcgtgg

SEQ ID NO: 1030 - DNA, 24 bp, Artificial Sequence
  Description of Artificial Sequence: Synthetic oligonucleotide
  5' Phos
ttcgtatgttcaggtatgttcagg

SEQ ID NO: 1031 - DNA, 24 bp, Artificial Sequence
  Description of Artificial Sequence: Synthetic oligonucleotide
  5' Phos
ttcgtattcctgtctattcctgtc

SEQ ID NO: 1032 - DNA, 24 bp, Artificial Sequence
  Description of Artificial Sequence: Synthetic oligonucleotide
  5' Phos
ttcgtcaagagatctcaagagatc

SEQ ID NO: 1033 - DNA, 24 bp, Artificial Sequence
  Description of Artificial Sequence: Synthetic oligonucleotide
  5' Phos
ttcgtcactaccaatcactaccaa

SEQ ID NO: 1034 - DNA, 24 bp, Artificial Sequence
  Description of Artificial Sequence: Synthetic oligonucleotide
  5' Phos
ttcgtcagtctgcgtcagtctgcg

SEQ ID NO: 1035 - DNA, 24 bp, Artificial Sequence
  Description of Artificial Sequence: Synthetic oligonucleotide
  5' Phos
ttcgtcagttaagctcagttaagc

SEQ ID NO: 1036 - DNA, 24 bp, Artificial Sequence
  Description of Artificial Sequence: Synthetic oligonucleotide
  5' Phos
ttcgtccagagtggtccagagtgg

SEQ ID NO: 1037 - DNA, 24 bp, Artificial Sequence
  Description of Artificial Sequence: Synthetic oligonucleotide
  5' Phos
ttcgtccagtcgtctccagtcgtc

SEQ ID NO: 1038 - DNA, 24 bp, Artificial Sequence
  Description of Artificial Sequence: Synthetic oligonucleotide
  5' Phos
ttcgtccgacgttgtccgacgttg

SEQ ID NO: 1039 - DNA, 24 bp, Artificial Sequence
  Description of Artificial Sequence: Synthetic oligonucleotide
  5' Phos
ttcgtcctaccgactcctaccgac

SEQ ID NO: 1040 - DNA, 24 bp, Artificial Sequence
  Description of Artificial Sequence: Synthetic oligonucleotide
  5' Phos
ttcgtccttcctcctccttcctcc

SEQ ID NO: 1041 - DNA, 24 bp, Artificial Sequence
  Description of Artificial Sequence: Synthetic oligonucleotide
  5' Phos
ttcgtcgagagccatcgagagcca

SEQ ID NO: 1042 - DNA, 24 bp, Artificial Sequence
  Description of Artificial Sequence: Synthetic oligonucleotide
  5' Phos
ttcgtcgcacagactcgcacagac

SEQ ID NO: 1043 - DNA, 24 bp, Artificial Sequence
  Description of Artificial Sequence: Synthetic oligonucleotide
  5' Phos
ttcgtcgccgttagtcgccgttag

SEQ ID NO: 1044 - DNA, 24 bp, Artificial Sequence
  Description of Artificial Sequence: Synthetic oligonucleotide
  5' Phos
ttcgtcggcacaactcggcacaac

SEQ ID NO: 1045 - DNA, 24 bp, Artificial Sequence
  Description of Artificial Sequence: Synthetic oligonucleotide
  5' Phos
ttcgtcggcagttgtcggcagttg

SEQ ID NO: 1046 - DNA, 24 bp, Artificial Sequence
  Description of Artificial Sequence: Synthetic oligonucleotide
  5' Phos
ttcgtcggtcacactcggtcacac

SEQ ID NO: 1047 - DNA, 24 bp, Artificial Sequence
  Description of Artificial Sequence: Synthetic oligonucleotide
  5' Phos
ttcgtcgtgctagctcgtgctagc

SEQ ID NO: 1048 - DNA, 24 bp, Artificial Sequence
  Description of Artificial Sequence: Synthetic oligonucleotide
  5' Phos
ttcgtctagcctaatctagcctaa

SEQ ID NO: 1049 - DNA, 24 bp, Artificial Sequence
  Description of Artificial Sequence: Synthetic oligonucleotide
  5' Phos
ttcgtctcactgcgtctcactgcg

SEQ ID NO: 1050 - DNA, 24 bp, Artificial Sequence
  Description of Artificial Sequence: Synthetic oligonucleotide
  5' Phos
ttcgtctccggcaatctccggcaa

SEQ ID NO: 1051 - DNA, 24 bp, Artificial Sequence
  Description of Artificial Sequence: Synthetic oligonucleotide
  5' Phos
ttcgtctcgctctctctcgctctc

SEQ ID NO: 1052 - DNA, 24 bp, Artificial Sequence
  Description of Artificial Sequence: Synthetic oligonucleotide
  5' Phos
ttcgtctgtcgcaatctgtcgcaa

SEQ ID NO: 1053 - DNA, 24 bp, Artificial Sequence
  Description of Artificial Sequence: Synthetic oligonucleotide
  5' Phos
ttcgtcttaacctctcttaacctc

SEQ ID NO: 1054 - DNA, 24 bp, Artificial Sequence
  Description of Artificial Sequence: Synthetic oligonucleotide
  5' Phos
ttcgtgacacatgatgacacatga

SEQ ID NO: 1055 - DNA, 24 bp, Artificial Sequence
  Description of Artificial Sequence: Synthetic oligonucleotide
  5' Phos
ttcgtgagagtgaatgagagtgaa

SEQ ID NO: 1056 - DNA, 24 bp, Artificial Sequence
  Description of Artificial Sequence: Synthetic oligonucleotide
  5' Phos
ttcgtgagtggctgtgagtggctg

SEQ ID NO: 1057 - DNA, 24 bp, Artificial Sequence
  Description of Artificial Sequence: Synthetic oligonucleotide
  5' Phos
ttcgtgattgaccatgattgacca

SEQ ID NO: 1058 - DNA, 24 bp, Artificial Sequence
  Description of Artificial Sequence: Synthetic oligonucleotide
  5' Phos
ttcgtgcagtcgcatgcagtcgca

SEQ ID NO: 1059 - DNA, 24 bp, Artificial Sequence
  Description of Artificial Sequence: Synthetic oligonucleotide
  5' Phos
ttcgtgccatgaggtgccatgagg

SEQ ID NO: 1060 - DNA, 24 bp, Artificial Sequence
  Description of Artificial Sequence: Synthetic oligonucleotide
  5' Phos
ttcgtgcctaacgctgcctaacgc

SEQ ID NO: 1061 - DNA, 24 bp, Artificial Sequence
  Description of Artificial Sequence: Synthetic oligonucleotide
  5' Phos
ttcgtgcctataactgcctataac

SEQ ID NO: 1062 - DNA, 24 bp, Artificial Sequence
  Description of Artificial Sequence: Synthetic oligonucleotide
  5' Phos
ttcgtgcgagagagtgcgagagag

SEQ ID NO: 1063 - DNA, 24 bp, Artificial Sequence
  Description of Artificial Sequence: Synthetic oligonucleotide
  5' Phos
ttcgtgcgcgatcatgcgcgatca

SEQ ID NO: 1064 - DNA, 24 bp, Artificial Sequence
  Description of Artificial Sequence: Synthetic oligonucleotide
  5' Phos
ttcgtgcggagtgatgcggagtga

SEQ ID NO: 1065 - DNA, 24 bp, Artificial Sequence
  Description of Artificial Sequence: Synthetic oligonucleotide
  5' Phos
ttcgtgcggattcctgcggattcc

SEQ ID NO: 1066 - DNA, 24 bp, Artificial Sequence
  Description of Artificial Sequence: Synthetic oligonucleotide
  5' Phos
ttcgtgcggctacatgcggctaca

SEQ ID NO: 1067 - DNA, 24 bp, Artificial Sequence
  Description of Artificial Sequence: Synthetic oligonucleotide
  5' Phos
ttcgtgcgtaacaatgcgtaacaa

SEQ ID NO: 1068 - DNA, 24 bp, Artificial Sequence
  Description of Artificial Sequence: Synthetic oligonucleotide
  5' Phos
ttcgtgcgtcctcatgcgtcctca

SEQ ID NO: 1069 - DNA, 24 bp, Artificial Sequence
  Description of Artificial Sequence: Synthetic oligonucleotide
  5' Phos
ttcgtgcgttcagctgcgttcagc

SEQ ID NO: 1070 - DNA, 24 bp, Artificial Sequence
  Description of Artificial Sequence: Synthetic oligonucleotide
  5' Phos
ttcgtgcttcagcgtgcttcagcg

SEQ ID NO: 1071 - DNA, 24 bp, Artificial Sequence
  Description of Artificial Sequence: Synthetic oligonucleotide
  5' Phos
ttcgtgcttgcctctgcttgcctc

SEQ ID NO: 1072 - DNA, 24 bp, Artificial Sequence
  Description of Artificial Sequence: Synthetic oligonucleotide
  5' Phos
ttcgtggaactggctggaactggc

SEQ ID NO: 1073 - DNA, 24 bp, Artificial Sequence
  Description of Artificial Sequence: Synthetic oligonucleotide
  5' Phos
ttcgtgtattggagtgtattggag

SEQ ID NO: 1074 - DNA, 24 bp, Artificial Sequence
  Description of Artificial Sequence: Synthetic oligonucleotide
  5' Phos
ttcgtgtggaacggtgtggaacgg

SEQ ID NO: 1075 - DNA, 24 bp, Artificial Sequence
  Description of Artificial Sequence: Synthetic oligonucleotide
  5' Phos
ttcgtgtggagtcgtgtggagtcg

SEQ ID NO: 1076 - DNA, 24 bp, Artificial Sequence
  Description of Artificial Sequence: Synthetic oligonucleotide
  5' Phos
ttcgtgtgtggccatgtgtggcca

SEQ ID NO: 1077 - DNA, 24 bp, Artificial Sequence
  Description of Artificial Sequence: Synthetic oligonucleotide
  5' Phos
ttcgtgttaagaggtgttaagagg

SEQ ID NO: 1078 - DNA, 24 bp, Artificial Sequence
  Description of Artificial Sequence: Synthetic oligonucleotide
  5' Phos
ttcgtgttactcactgttactcac

SEQ ID NO: 1079 - DNA, 24 bp, Artificial Sequence
  Description of Artificial Sequence: Synthetic oligonucleotide
  5' Phos
ttcgtgttcgcagctgttcgcagc

SEQ ID NO: 1080 - DNA, 24 bp, Artificial Sequence
  Description of Artificial Sequence: Synthetic oligonucleotide
  5' Phos
ttcgtgttggcatatgttggcata

SEQ ID NO: 1081 - DNA, 24 bp, Artificial Sequence
  Description of Artificial Sequence: Synthetic oligonucleotide
  5' Phos
ttcgttaagtgcagttaagtgcag

SEQ ID NO: 1082 - DNA, 24 bp, Artificial Sequence
  Description of Artificial Sequence: Synthetic oligonucleotide
  5' Phos
ttcgttagagatccttagagatcc

SEQ ID NO: 1083 - DNA, 24 bp, Artificial Sequence
  Description of Artificial Sequence: Synthetic oligonucleotide
  5' Phos
ttcgttaggtcagattaggtcaga

SEQ ID NO: 1084 - DNA, 24 bp, Artificial Sequence
  Description of Artificial Sequence: Synthetic oligonucleotide
  5' Phos
ttcgttatctcctgttatctcctg

SEQ ID NO: 1085 - DNA, 24 bp, Artificial Sequence
  Description of Artificial Sequence: Synthetic oligonucleotide
  5' Phos
ttcgttcagtgtcgttcagtgtcg

SEQ ID NO: 1086 - DNA, 24 bp, Artificial Sequence
  Description of Artificial Sequence: Synthetic oligonucleotide
  5' Phos
ttcgttccaagaagttccaagaag

SEQ ID NO: 1087 - DNA, 24 bp, Artificial Sequence
  Description of Artificial Sequence: Synthetic oligonucleotide
  5' Phos
ttcgttccaccgcattccaccgca

SEQ ID NO: 1088 - DNA, 24 bp, Artificial Sequence
  Description of Artificial Sequence: Synthetic oligonucleotide
  5' Phos
ttcgttccactatcttccactatc

SEQ ID NO: 1089 - DNA, 24 bp, Artificial Sequence
  Description of Artificial Sequence: Synthetic oligonucleotide
  5' Phos
ttcgttccacttgattccacttga

SEQ ID NO: 1090 - DNA, 24 bp, Artificial Sequence
  Description of Artificial Sequence: Synthetic oligonucleotide
  5' Phos
ttcgttccgagagcttccgagagc

SEQ ID NO: 1091 - DNA, 24 bp, Artificial Sequence
  Description of Artificial Sequence: Synthetic oligonucleotide
  5' Phos
ttcgttcctgagccttcctgagcc

SEQ ID NO: 1092 - DNA, 24 bp, Artificial Sequence
  Description of Artificial Sequence: Synthetic oligonucleotide
  5' Phos
ttcgttcgagtcgcttcgagtcgc

SEQ ID NO: 1093 - DNA, 24 bp, Artificial Sequence
  Description of Artificial Sequence: Synthetic oligonucleotide
  5' Phos
ttcgttcgtgccagttcgtgccag

SEQ ID NO: 1094 - DNA, 24 bp, Artificial Sequence
  Description of Artificial Sequence: Synthetic oligonucleotide
  5' Phos
ttcgttctacaccattctacacca

SEQ ID NO: 1095 - DNA, 24 bp, Artificial Sequence
  Description of Artificial Sequence: Synthetic oligonucleotide
  5' Phos
ttcgttctcgctccttctcgctcc

SEQ ID NO: 1096 - DNA, 24 bp, Artificial Sequence
  Description of Artificial Sequence: Synthetic oligonucleotide
  5' Phos
ttcgttctggccacttctggccac

SEQ ID NO: 1097 - DNA, 24 bp, Artificial Sequence
  Description of Artificial Sequence: Synthetic oligonucleotide
  5' Phos
ttcgttgaatggtgttgaatggtg

SEQ ID NO: 1098 - DNA, 24 bp, Artificial Sequence
  Description of Artificial Sequence: Synthetic oligonucleotide
  5' Phos
ttcgttgagccgacttgagccgac

SEQ ID NO: 1099 - DNA, 24 bp, Artificial Sequence
  Description of Artificial Sequence: Synthetic oligonucleotide
  5' Phos
ttcgttgcgccaagttgcgccaag

SEQ ID NO: 1100 - DNA, 24 bp, Artificial Sequence
  Description of Artificial Sequence: Synthetic oligonucleotide
  5' Phos
ttcgttgctcttagttgctcttag

SEQ ID NO: 1101 - DNA, 24 bp, Artificial Sequence
  Description of Artificial Sequence: Synthetic oligonucleotide
  5' Phos
ttcgttggcaaggcttggcaaggc

SEQ ID NO: 1102 - DNA, 24 bp, Artificial Sequence
  Description of Artificial Sequence: Synthetic oligonucleotide
  5' Phos
ttcgttggctcacgttggctcacg

SEQ ID NO: 1103 - DNA, 24 bp, Artificial Sequence
  Description of Artificial Sequence: Synthetic oligonucleotide
  5' Phos
ttcgttggcttccattggcttcca

SEQ ID NO: 1104 - DNA, 24 bp, Artificial Sequence
  Description of Artificial Sequence: Synthetic oligonucleotide
  5' Phos
ttcgttgtggatacttgtggatac

SEQ ID NO: 1105 - DNA, 24 bp, Artificial Sequence
  Description of Artificial Sequence: Synthetic oligonucleotide
  5' Phos
ttcgaacacggatgaacacggatg

SEQ ID NO: 1106 - DNA, 24 bp, Artificial Sequence
  Description of Artificial Sequence: Synthetic oligonucleotide
  5' Phos
ttcgaacagaccggaacagaccgg

SEQ ID NO: 1107 - DNA, 24 bp, Artificial Sequence
  Description of Artificial Sequence: Synthetic oligonucleotide
  5' Phos
ttcgaacagtgatcaacagtgatc

SEQ ID NO: 1108 - DNA, 24 bp, Artificial Sequence
  Description of Artificial Sequence: Synthetic oligonucleotide
  5' Phos
ttcgaaccatcttgaaccatcttg

SEQ ID NO: 1109 - DNA, 24 bp, Artificial Sequence
  Description of Artificial Sequence: Synthetic oligonucleotide
  5' Phos
ttcgaacggtgacgaacggtgacg

SEQ ID NO: 1110 - DNA, 24 bp, Artificial Sequence
  Description of Artificial Sequence: Synthetic oligonucleotide
  5' Phos
ttcgaactacgcggaactacgcgg

SEQ ID NO: 1111 - DNA, 24 bp, Artificial Sequence
  Description of Artificial Sequence: Synthetic oligonucleotide
  5' Phos
ttcgaactaggcttaactaggctt

SEQ ID NO: 1112 - DNA, 24 bp, Artificial Sequence
  Description of Artificial Sequence: Synthetic oligonucleotide
  5' Phos
ttcgaactggcgtgaactggcgtg

SEQ ID NO: 1113 - DNA, 24 bp, Artificial Sequence
  Description of Artificial Sequence: Synthetic oligonucleotide
  5' Phos
ttcgaagacaggataagacaggat

SEQ ID NO: 1114 - DNA, 24 bp, Artificial Sequence
  Description of Artificial Sequence: Synthetic oligonucleotide
  5' Phos
ttcgaagagccagtaagagccagt

SEQ ID NO: 1115 - DNA, 24 bp, Artificial Sequence
  Description of Artificial Sequence: Synthetic oligonucleotide
  5' Phos
ttcgaagagtatcgaagagtatcg

SEQ ID NO: 1116 - DNA, 24 bp, Artificial Sequence
  Description of Artificial Sequence: Synthetic oligonucleotide
  5' Phos
ttcgaaggaacactaaggaacact

SEQ ID NO: 1117 - DNA, 24 bp, Artificial Sequence
  Description of Artificial Sequence: Synthetic oligonucleotide
  5' Phos
ttcgaagtcgcaggaagtcgcagg

SEQ ID NO: 1118 - DNA, 24 bp, Artificial Sequence
  Description of Artificial Sequence: Synthetic oligonucleotide
  5' Phos
ttcgaatcacagtcaatcacagtc

SEQ ID NO: 1119 - DNA, 24 bp, Artificial Sequence
  Description of Artificial Sequence: Synthetic oligonucleotide
  5' Phos
ttcgaatcgccattaatcgccatt

SEQ ID NO: 1120 - DNA, 24 bp, Artificial Sequence
  Description of Artificial Sequence: Synthetic oligonucleotide
  5' Phos
ttcgaattgcggccaattgcggcc

SEQ ID NO: 1121 - DNA, 24 bp, Artificial Sequence
  Description of Artificial Sequence: Synthetic oligonucleotide
  5' Phos
ttcgacaactcgcgacaactcgcg

SEQ ID NO: 1122 - DNA, 24 bp, Artificial Sequence
  Description of Artificial Sequence: Synthetic oligonucleotide
  5' Phos
ttcgacaagctgcgacaagctgcg

SEQ ID NO: 1123 - DNA, 24 bp, Artificial Sequence
  Description of Artificial Sequence: Synthetic oligonucleotide
  5' Phos
ttcgacaccaattcacaccaattc

SEQ ID NO: 1124 - DNA, 24 bp, Artificial Sequence
  Description of Artificial Sequence: Synthetic oligonucleotide
  5' Phos
ttcgacacgaaggtacacgaaggt

SEQ ID NO: 1125 - DNA, 24 bp, Artificial Sequence
  Description of Artificial Sequence: Synthetic oligonucleotide
  5' Phos
ttcgacagaatgtgacagaatgtg

SEQ ID NO: 1126 - DNA, 24 bp, Artificial Sequence
  Description of Artificial Sequence: Synthetic oligonucleotide
  5' Phos
ttcgacatagtggtacatagtggt

SEQ ID NO: 1127 - DNA, 24 bp, Artificial Sequence
  Description of Artificial Sequence: Synthetic oligonucleotide
  5' Phos
ttcgaccaccacgtaccaccacgt

SEQ ID NO: 1128 - DNA, 24 bp, Artificial Sequence
  Description of Artificial Sequence: Synthetic oligonucleotide
  5' Phos
ttcgaccgacagctaccgacagct

SEQ ID NO: 1129 - DNA, 24 bp, Artificial Sequence
  Description of Artificial Sequence: Synthetic oligonucleotide
  5' Phos
ttcgaccggctagtaccggctagt

SEQ ID NO: 1130 - DNA, 24 bp, Artificial Sequence
  Description of Artificial Sequence: Synthetic oligonucleotide
  5' Phos
ttcgaccgtagattaccgtagatt

SEQ ID NO: 1131 - DNA, 24 bp, Artificial Sequence
  Description of Artificial Sequence: Synthetic oligonucleotide
  5' Phos
ttcgaccgtgacttaccgtgactt

SEQ ID NO: 1132 - DNA, 24 bp, Artificial Sequence
  Description of Artificial Sequence: Synthetic oligonucleotide
  5' Phos
ttcgacctcacaacacctcacaac

SEQ ID NO: 1133 - DNA, 24 bp, Artificial Sequence
  Description of Artificial Sequence: Synthetic oligonucleotide
  5' Phos
ttcgaccttgtcctaccttgtcct

SEQ ID NO: 1134 - DNA, 24 bp, Artificial Sequence
  Description of Artificial Sequence: Synthetic oligonucleotide
  5' Phos
ttcgacgaagcaggacgaagcagg

SEQ ID NO: 1135 - DNA, 24 bp, Artificial Sequence
  Description of Artificial Sequence: Synthetic oligonucleotide
  5' Phos
ttcgacgactggacacgactggac

SEQ ID NO: 1136 - DNA, 24 bp, Artificial Sequence
  Description of Artificial Sequence: Synthetic oligonucleotide
  5' Phos
ttcgacgagagcagacgagagcag

SEQ ID NO: 1137 - DNA, 24 bp, Artificial Sequence
  Description of Artificial Sequence: Synthetic oligonucleotide
  5' Phos
ttcgacgcctgttgacgcctgttg

SEQ ID NO: 1138 - DNA, 24 bp, Artificial Sequence
  Description of Artificial Sequence: Synthetic oligonucleotide
  5' Phos
ttcgacgcgacttcacgcgacttc

SEQ ID NO: 1139 - DNA, 24 bp, Artificial Sequence
  Description of Artificial Sequence: Synthetic oligonucleotide
  5' Phos
ttcgacggattgatacggattgat

SEQ ID NO: 1140 - DNA, 24 bp, Artificial Sequence
  Description of Artificial Sequence: Synthetic oligonucleotide
  5' Phos
ttcgacggctcatgacggctcatg

SEQ ID NO: 1141 - DNA, 24 bp, Artificial Sequence
  Description of Artificial Sequence: Synthetic oligonucleotide
  5' Phos
ttcgacggtaagatacggtaagat

SEQ ID NO: 1142 - DNA, 24 bp, Artificial Sequence
  Description of Artificial Sequence: Synthetic oligonucleotide
  5' Phos
ttcgacggtagcacacggtagcac

SEQ ID NO: 1143 - DNA, 24 bp, Artificial Sequence
  Description of Artificial Sequence: Synthetic oligonucleotide
  5' Phos
ttcgacggtgttcgacggtgttcg

SEQ ID NO: 1144 - DNA, 24 bp, Artificial Sequence
  Description of Artificial Sequence: Synthetic oligonucleotide
  5' Phos
ttcgacgtcgatggacgtcgatgg

SEQ ID NO: 1145 - DNA, 24 bp, Artificial Sequence
  Description of Artificial Sequence: Synthetic oligonucleotide
  5' Phos
ttcgacgtgcagacacgtgcagac

SEQ ID NO: 1146 - DNA, 24 bp, Artificial Sequence
  Description of Artificial Sequence: Synthetic oligonucleotide
  5' Phos
ttcgacgttccagcacgttccagc

SEQ ID NO: 1147 - DNA, 24 bp, Artificial Sequence
  Description of Artificial Sequence: Synthetic oligonucleotide
  5' Phos
ttcgactagcttgtactagcttgt

SEQ ID NO: 1148 - DNA, 24 bp, Artificial Sequence
  Description of Artificial Sequence: Synthetic oligonucleotide
  5' Phos
ttcgactaggacgcactaggacgc

SEQ ID NO: 1149 - DNA, 24 bp, Artificial Sequence
  Description of Artificial Sequence: Synthetic oligonucleotide
  5' Phos
ttcgactcacctggactcacctgg

SEQ ID NO: 1150 - DNA, 24 bp, Artificial Sequence
  Description of Artificial Sequence: Synthetic oligonucleotide
  5' Phos
ttcgactcatatcgactcatatcg

SEQ ID NO: 1151 - DNA, 24 bp, Artificial Sequence
  Description of Artificial Sequence: Synthetic oligonucleotide
  5' Phos
ttcgactgaccgtgactgaccgtg

SEQ ID NO: 1152 - DNA, 24 bp, Artificial Sequence
  Description of Artificial Sequence: Synthetic oligonucleotide
  5' Phos
ttcgacttctaaccacttctaacc

SEQ ID NO: 1153 - DNA, 24 bp, Artificial Sequence
  Description of Artificial Sequence: Synthetic oligonucleotide
  5' Phos
tgacacttggcgctacttggcgct

SEQ ID NO: 1154 - DNA, 24 bp, Artificial Sequence
  Description of Artificial Sequence: Synthetic oligonucleotide
  5' Phos
tgacagaacgctccagaacgctcc

SEQ ID NO: 1155 - DNA, 24 bp, Artificial Sequence
  Description of Artificial Sequence: Synthetic oligonucleotide
  5' Phos
tgacagaacttaggagaacttagg

SEQ ID NO: 1156 - DNA, 24 bp, Artificial Sequence
  Description of Artificial Sequence: Synthetic oligonucleotide
  5' Phos
tgacagaagcgcatagaagcgcat

SEQ ID NO: 1157 - DNA, 24 bp, Artificial Sequence
  Description of Artificial Sequence: Synthetic oligonucleotide
  5' Phos
tgacagacaatagcagacaatagc

SEQ ID NO: 1158 - DNA, 24 bp, Artificial Sequence
  Description of Artificial Sequence: Synthetic oligonucleotide
  5' Phos
tgacagaccgagacagaccgagac

SEQ ID NO: 1159 - DNA, 24 bp, Artificial Sequence
  Description of Artificial Sequence: Synthetic oligonucleotide
  5' Phos
tgacagacgctgtcagacgctgtc

SEQ ID NO: 1160 - DNA, 24 bp, Artificial Sequence
  Description of Artificial Sequence: Synthetic oligonucleotide
  5' Phos
tgacagacgtagcgagacgtagcg

SEQ ID NO: 1161 - DNA, 24 bp, Artificial Sequence
  Description of Artificial Sequence: Synthetic oligonucleotide
  5' Phos
tgacagagagctctagagagctct

SEQ ID NO: 1162 - DNA, 24 bp, Artificial Sequence
  Description of Artificial Sequence: Synthetic oligonucleotide
  5' Phos
tgacagaggccactagaggccact

SEQ ID NO: 1163 - DNA, 24 bp, Artificial Sequence
  Description of Artificial Sequence: Synthetic oligonucleotide
  5' Phos
tgacagattgccgcagattgccgc

SEQ ID NO: 1164 - DNA, 24 bp, Artificial Sequence
  Description of Artificial Sequence: Synthetic oligonucleotide
  5' Phos
tgacagcacgatgcagcacgatgc

SEQ ID NO: 1165 - DNA, 24 bp, Artificial Sequence
  Description of Artificial Sequence: Synthetic oligonucleotide
  5' Phos
tgacagcagagaatagcagagaat

SEQ ID NO: 1166 - DNA, 24 bp, Artificial Sequence
  Description of Artificial Sequence: Synthetic oligonucleotide
  5' Phos
tgacagccacaaggagccacaagg

SEQ ID NO: 1167 - DNA, 24 bp, Artificial Sequence
  Description of Artificial Sequence: Synthetic oligonucleotide
  5' Phos
tgacagccaggaagagccaggaag

SEQ ID NO: 1168 - DNA, 24 bp, Artificial Sequence
  Description of Artificial Sequence: Synthetic oligonucleotide
  5' Phos
tgacagctctggagagctctggag

SEQ ID NO: 1169 - DNA, 24 bp, Artificial Sequence
  Description of Artificial Sequence: Synthetic oligonucleotide
  5' Phos
tgacagcttggcagagcttggcag

SEQ ID NO: 1170 - DNA, 24 bp, Artificial Sequence
  Description of Artificial Sequence: Synthetic oligonucleotide
  5' Phos
tgacaggaataacgaggaataacg

SEQ ID NO: 1171 - DNA, 24 bp, Artificial Sequence
  Description of Artificial Sequence: Synthetic oligonucleotide
  5' Phos
tgacaggaattgacaggaattgac

SEQ ID NO: 1172 - DNA, 24 bp, Artificial Sequence
  Description of Artificial Sequence: Synthetic oligonucleotide
  5' Phos
tgacaggaggaattaggaggaatt

SEQ ID NO: 1173 - DNA, 24 bp, Artificial Sequence
  Description of Artificial Sequence: Synthetic oligonucleotide
  5' Phos
tgacaggataggccaggataggcc

SEQ ID NO: 1174 - DNA, 24 bp, Artificial Sequence
  Description of Artificial Sequence: Synthetic oligonucleotide
  5' Phos
tgacaggtggccttaggtggcctt

SEQ ID NO: 1175 - DNA, 24 bp, Artificial Sequence
  Description of Artificial Sequence: Synthetic oligonucleotide
  5' Phos
tgacaggtgttgcgaggtgttgcg

SEQ ID NO: 1176 - DNA, 24 bp, Artificial Sequence
  Description of Artificial Sequence: Synthetic oligonucleotide
  5' Phos
tgacaggttaggtgaggttaggtg

SEQ ID NO: 1177 - DNA, 24 bp, Artificial Sequence
  Description of Artificial Sequence: Synthetic oligonucleotide
  5' Phos
tgacagtccgtcctagtccgtcct

SEQ ID NO: 1178 - DNA, 24 bp, Artificial Sequence
  Description of Artificial Sequence: Synthetic oligonucleotide
  5' Phos
tgacagtcgatccgagtcgatccg

SEQ ID NO: 1179 - DNA, 24 bp, Artificial Sequence
  Description of Artificial Sequence: Synthetic oligonucleotide
  5' Phos
tgacagtcgctgctagtcgctgct

SEQ ID NO: 1180 - DNA, 24 bp, Artificial Sequence
  Description of Artificial Sequence: Synthetic oligonucleotide
  5' Phos
tgacagtcgtcctcagtcgtcctc

SEQ ID NO: 1181 - DNA, 24 bp, Artificial Sequence
  Description of Artificial Sequence: Synthetic oligonucleotide
  5' Phos
tgacagtgttccgtagtgttccgt

SEQ ID NO: 1182 - DNA, 24 bp, Artificial Sequence
  Description of Artificial Sequence: Synthetic oligonucleotide
  5' Phos
tgacagttgctcatagttgctcat

SEQ ID NO: 1183 - DNA, 24 bp, Artificial Sequence
  Description of Artificial Sequence: Synthetic oligonucleotide
  5' Phos
tgacataacgtgagataacgtgag

SEQ ID NO: 1184 - DNA, 24 bp, Artificial Sequence
  Description of Artificial Sequence: Synthetic oligonucleotide
  5' Phos
tgacatacgcaggcatacgcaggc

SEQ ID NO: 1185 - DNA, 24 bp, Artificial Sequence
  Description of Artificial Sequence: Synthetic oligonucleotide
  5' Phos
tgacatactgatgcatactgatgc

SEQ ID NO: 1186 - DNA, 24 bp, Artificial Sequence
  Description of Artificial Sequence: Synthetic oligonucleotide
  5' Phos
tgacatagttcgtcatagttcgtc

SEQ ID NO: 1187 - DNA, 24 bp, Artificial Sequence
  Description of Artificial Sequence: Synthetic oligonucleotide
  5' Phos
tgacatatcttcgcatatcttcgc

SEQ ID NO: 1188 - DNA, 24 bp, Artificial Sequence
  Description of Artificial Sequence: Synthetic oligonucleotide
  5' Phos
tgacatatgccttcatatgccttc

SEQ ID NO: 1189 - DNA, 24 bp, Artificial Sequence
  Description of Artificial Sequence: Synthetic oligonucleotide
  5' Phos
tgacatcagatcacatcagatcac

SEQ ID NO: 1190 - DNA, 24 bp, Artificial Sequence
  Description of Artificial Sequence: Synthetic oligonucleotide
  5' Phos
tgacatccaatctgatccaatctg

SEQ ID NO: 1191 - DNA, 24 bp, Artificial Sequence
  Description of Artificial Sequence: Synthetic oligonucleotide
  5' Phos
tgacatccacagcgatccacagcg

SEQ ID NO: 1192 - DNA, 24 bp, Artificial Sequence
  Description of Artificial Sequence: Synthetic oligonucleotide
  5' Phos
tgacatccggaacgatccggaacg

SEQ ID NO: 1193 - DNA, 24 bp, Artificial Sequence
  Description of Artificial Sequence: Synthetic oligonucleotide
  5' Phos
tgacatcggcttccatcggcttcc

SEQ ID NO: 1194 - DNA, 24 bp, Artificial Sequence
  Description of Artificial Sequence: Synthetic oligonucleotide
  5' Phos
tgacatcgtcggagatcgtcggag

SEQ ID NO: 1195 - DNA, 24 bp, Artificial Sequence
  Description of Artificial Sequence: Synthetic oligonucleotide
  5' Phos
tgacatctctcacgatctctcacg

SEQ ID NO: 1196 - DNA, 24 bp, Artificial Sequence
  Description of Artificial Sequence: Synthetic oligonucleotide
  5' Phos
tgacatgcacctgcatgcacctgc

SEQ ID NO: 1197 - DNA, 24 bp, Artificial Sequence
  Description of Artificial Sequence: Synthetic oligonucleotide
  5' Phos
tgacatgcagtcgcatgcagtcgc

SEQ ID NO: 1198 - DNA, 24 bp, Artificial Sequence
  Description of Artificial Sequence: Synthetic oligonucleotide
  5' Phos
tgacatgccgtaggatgccgtagg

SEQ ID NO: 1199 - DNA, 24 bp, Artificial Sequence
  Description of Artificial Sequence: Synthetic oligonucleotide
  5' Phos
tgacatgcgcgatcatgcgcgatc

SEQ ID NO: 1200 - DNA, 24 bp, Artificial Sequence
  Description of Artificial Sequence: Synthetic oligonucleotide
  5' Phos
tgacatgtggtgatatgtggtgat

SEQ ID NO: 1201 - DNA, 24 bp, Artificial Sequence
  Description of Artificial Sequence: Synthetic oligonucleotide
  5' Phos
tgacattacgagccattacgagcc

SEQ ID NO: 1202 - DNA, 24 bp, Artificial Sequence
  Description of Artificial Sequence: Synthetic oligonucleotide
  5' Phos
tgacattccacggcattccacggc

SEQ ID NO: 1203 - DNA, 24 bp, Artificial Sequence
  Description of Artificial Sequence: Synthetic oligonucleotide
  5' Phos
tgacattcggcgtcattcggcgtc

SEQ ID NO: 1204 - DNA, 24 bp, Artificial Sequence
  Description of Artificial Sequence: Synthetic oligonucleotide
  5' Phos
tgacattggaagccattggaagcc

SEQ ID NO: 1205 - DNA, 24 bp, Artificial Sequence
  Description of Artificial Sequence: Synthetic oligonucleotide
  5' Phos
tgacattgtcggccattgtcggcc

SEQ ID NO: 1206 - DNA, 24 bp, Artificial Sequence
  Description of Artificial Sequence: Synthetic oligonucleotide
  5' Phos
tgaccaaccgcttgcaaccgcttg

SEQ ID NO: 1207 - DNA, 24 bp, Artificial Sequence
  Description of Artificial Sequence: Synthetic oligonucleotide
  5' Phos
tgaccaactggtggcaactggtgg

SEQ ID NO: 1208 - DNA, 24 bp, Artificial Sequence
  Description of Artificial Sequence: Synthetic oligonucleotide
  5' Phos
tgaccaagatggtgcaagatggtg

SEQ ID NO: 1209 - DNA, 24 bp, Artificial Sequence
  Description of Artificial Sequence: Synthetic oligonucleotide
  5' Phos
tgaccaagattcgacaagattcga

SEQ ID NO: 1210 - DNA, 24 bp, Artificial Sequence
  Description of Artificial Sequence: Synthetic oligonucleotide
  5' Phos
tgaccaagcacgagcaagcacgag

SEQ ID NO: 1211 - DNA, 24 bp, Artificial Sequence
  Description of Artificial Sequence: Synthetic oligonucleotide
  5' Phos
tgaccaagcctgtgcaagcctgtg

SEQ ID NO: 1212 - DNA, 24 bp, Artificial Sequence
  Description of Artificial Sequence: Synthetic oligonucleotide
  5' Phos
tgaccaagctcacgcaagctcacg

SEQ ID NO: 1213 - DNA, 24 bp, Artificial Sequence
  Description of Artificial Sequence: Synthetic oligonucleotide
  5' Phos
tgaccaaggttgcgcaaggttgcg

SEQ ID NO: 1214 - DNA, 24 bp, Artificial Sequence
  Description of Artificial Sequence: Synthetic oligonucleotide
  5' Phos
tgaccaagtcgacgcaagtcgacg

SEQ ID NO: 1215 - DNA, 24 bp, Artificial Sequence
  Description of Artificial Sequence: Synthetic oligonucleotide
  5' Phos
tgaccaccacgaagcaccacgaag

SEQ ID NO: 1216 - DNA, 24 bp, Artificial Sequence
  Description of Artificial Sequence: Synthetic oligonucleotide
  5' Phos
tgaccaccgatattcaccgatatt

SEQ ID NO: 1217 - DNA, 24 bp, Artificial Sequence
  Description of Artificial Sequence: Synthetic oligonucleotide
  5' Phos
tgaccaccgtcgaacaccgtcgaa

SEQ ID NO: 1218 - DNA, 24 bp, Artificial Sequence
  Description of Artificial Sequence: Synthetic oligonucleotide
  5' Phos
tgaccaccgtgacacaccgtgaca

SEQ ID NO: 1219 - DNA, 24 bp, Artificial Sequence
  Description of Artificial Sequence: Synthetic oligonucleotide
  5' Phos
tgaccacctgctgacacctgctga

SEQ ID NO: 1220 - DNA, 24 bp, Artificial Sequence
  Description of Artificial Sequence: Synthetic oligonucleotide
  5' Phos
tgaccacgcacatacacgcacata

SEQ ID NO: 1221 - DNA, 24 bp, Artificial Sequence
  Description of Artificial Sequence: Synthetic oligonucleotide
  5' Phos
tgaccacgctaaggcacgctaagg

SEQ ID NO: 1222 - DNA, 24 bp, Artificial Sequence
  Description of Artificial Sequence: Synthetic oligonucleotide
  5' Phos
tgaccacgtaatctcacgtaatct

SEQ ID NO: 1223 - DNA, 24 bp, Artificial Sequence
  Description of Artificial Sequence: Synthetic oligonucleotide
  5' Phos
tgaccacgtggagtcacgtggagt

SEQ ID NO: 1224 - DNA, 24 bp, Artificial Sequence
  Description of Artificial Sequence: Synthetic oligonucleotide
  5' Phos
tgaccactcgagagcactcgagag

SEQ ID NO: 1225 - DNA, 24 bp, Artificial Sequence
  Description of Artificial Sequence: Synthetic oligonucleotide
  5' Phos
tgaccactctctgacactctctga

SEQ ID NO: 1226 - DNA, 24 bp, Artificial Sequence
  Description of Artificial Sequence: Synthetic oligonucleotide
  5' Phos
tgaccactctggctcactctggct

SEQ ID NO: 1227 - DNA, 24 bp, Artificial Sequence
  Description of Artificial Sequence: Synthetic oligonucleotide
  5' Phos
tgaccactgccatgcactgccatg

SEQ ID NO: 1228 - DNA, 24 bp, Artificial Sequence
  Description of Artificial Sequence: Synthetic oligonucleotide
  5' Phos
tgaccacttgaactcacttgaact

SEQ ID NO: 1229 - DNA, 24 bp, Artificial Sequence
  Description of Artificial Sequence: Synthetic oligonucleotide
  5' Phos
tgaccagacctgagcagacctgag

SEQ ID NO: 1230 - DNA, 24 bp, Artificial Sequence
  Description of Artificial Sequence: Synthetic oligonucleotide
  5' Phos
tgaccagcgagcatcagcgagcat

SEQ ID NO: 1231 - DNA, 24 bp, Artificial Sequence
  Description of Artificial Sequence: Synthetic oligonucleotide
  5' Phos
tgaccaggaagaggcaggaagagg

SEQ ID NO: 1232 - DNA, 24 bp, Artificial Sequence
  Description of Artificial Sequence: Synthetic oligonucleotide
  5' Phos
tgaccagtctcatacagtctcata

SEQ ID NO: 1233 - DNA, 24 bp, Artificial Sequence
  Description of Artificial Sequence: Synthetic oligonucleotide
  5' Phos
tgaccagttatcgacagttatcga

SEQ ID NO: 1234 - DNA, 24 bp, Artificial Sequence
  Description of Artificial Sequence: Synthetic oligonucleotide
  5' Phos
tgaccatacacgcgcatacacgcg

SEQ ID NO: 1235 - DNA, 24 bp, Artificial Sequence
  Description of Artificial Sequence: Synthetic oligonucleotide
  5' Phos
tgaccataccgacgcataccgacg

SEQ ID NO: 1236 - DNA, 24 bp, Artificial Sequence
  Description of Artificial Sequence: Synthetic oligonucleotide
  5' Phos
tgaccatcaatggtcatcaatggt

SEQ ID NO: 1237 - DNA, 24 bp, Artificial Sequence
  Description of Artificial Sequence: Synthetic oligonucleotide
  5' Phos
tgaccatgacaccgcatgacaccg

SEQ ID NO: 1238 - DNA, 24 bp, Artificial Sequence
  Description of Artificial Sequence: Synthetic oligonucleotide
  5' Phos
tgaccatggttcggcatggttcgg

SEQ ID NO: 1239 - DNA, 24 bp, Artificial Sequence
  Description of Artificial Sequence: Synthetic oligonucleotide
  5' Phos
tgaccattggagcgcattggagcg

SEQ ID NO: 1240 - DNA, 24 bp, Artificial Sequence
  Description of Artificial Sequence: Synthetic oligonucleotide
  5' Phos
tgacccaacgagagccaacgagag

SEQ ID NO: 1241 - DNA, 24 bp, Artificial Sequence
  Description of Artificial Sequence: Synthetic oligonucleotide
  5' Phos
tgacccaagaccagccaagaccag

SEQ ID NO: 1242 - DNA, 24 bp, Artificial Sequence
  Description of Artificial Sequence: Synthetic oligonucleotide
  5' Phos
tgacccaatcacggccaatcacgg

SEQ ID NO: 1243 - DNA, 24 bp, Artificial Sequence
  Description of Artificial Sequence: Synthetic oligonucleotide
  5' Phos
tgacccaccgttgtccaccgttgt

SEQ ID NO: 1244 - DNA, 24 bp, Artificial Sequence
  Description of Artificial Sequence: Synthetic oligonucleotide
  5' Phos
tgacccagatcggaccagatcgga

SEQ ID NO: 1245 - DNA, 24 bp, Artificial Sequence
  Description of Artificial Sequence: Synthetic oligonucleotide
  5' Phos
tgacccgaagtcagccgaagtcag

SEQ ID NO: 1246 - DNA, 24 bp, Artificial Sequence
  Description of Artificial Sequence: Synthetic oligonucleotide
  5' Phos
tgacccgctgaagtccgctgaagt

SEQ ID NO: 1247 - DNA, 24 bp, Artificial Sequence
  Description of Artificial Sequence: Synthetic oligonucleotide
  5' Phos
tgacccggaccataccggaccata

SEQ ID NO: 1248 - DNA, 24 bp, Artificial Sequence
  Description of Artificial Sequence: Synthetic oligonucleotide
  5' Phos
tgacccgttctaggccgttctagg

SEQ ID NO: 1249 - DNA, 24 bp, Artificial Sequence
  Description of Artificial Sequence: Synthetic oligonucleotide
  5' Phos
tgaccctaatgcggcctaatgcgg

SEQ ID NO: 1250 - DNA, 24 bp, Artificial Sequence
  Description of Artificial Sequence: Synthetic oligonucleotide
  5' Phos
tgaccctatgacgacctatgacga

SEQ ID NO: 1251 - DNA, 24 bp, Artificial Sequence
  Description of Artificial Sequence: Synthetic oligonucleotide
  5' Phos
tgaccctcaccagtcctcaccagt

SEQ ID NO: 1252 - DNA, 24 bp, Artificial Sequence
  Description of Artificial Sequence: Synthetic oligonucleotide
  5' Phos
tgaccctgaagacgcctgaagacg

SEQ ID NO: 1253 - DNA, 24 bp, Artificial Sequence
  Description of Artificial Sequence: Synthetic oligonucleotide
  5' Phos
tgaccctgactcctcctgactcct

SEQ ID NO: 1254 - DNA, 24 bp, Artificial Sequence
  Description of Artificial Sequence: Synthetic oligonucleotide
  5' Phos
tgaccgaagagtggcgaagagtgg

SEQ ID NO: 1255 - DNA, 24 bp, Artificial Sequence
  Description of Artificial Sequence: Synthetic oligonucleotide
  5' Phos
tgaccgaaggtggtcgaaggtggt

SEQ ID NO: 1256 - DNA, 24 bp, Artificial Sequence
  Description of Artificial Sequence: Synthetic oligonucleotide
  5' Phos
tgaccgactagcagcgactagcag

SEQ ID NO: 1257 - DNA, 24 bp, Artificial Sequence
  Description of Artificial Sequence: Synthetic oligonucleotide
  5' Phos
tgaccgactcgagacgactcgaga

SEQ ID NO: 1258 - DNA, 24 bp, Artificial Sequence
  Description of Artificial Sequence: Synthetic oligonucleotide
  5' Phos
tgaccgacttacaacgacttacaa

SEQ ID NO: 1259 - DNA, 24 bp, Artificial Sequence
  Description of Artificial Sequence: Synthetic oligonucleotide
  5' Phos
tgaccgaggattaacgaggattaa

SEQ ID NO: 1260 - DNA, 24 bp, Artificial Sequence
  Description of Artificial Sequence: Synthetic oligonucleotide
  5' Phos
tgaccgaggcatgtcgaggcatgt

SEQ ID NO: 1261 - DNA, 24 bp, Artificial Sequence
  Description of Artificial Sequence: Synthetic oligonucleotide
  5' Phos
tgaccgagtctgctcgagtctgct

SEQ ID NO: 1262 - DNA, 24 bp, Artificial Sequence
  Description of Artificial Sequence: Synthetic oligonucleotide
  5' Phos
tgaccgagtgagcacgagtgagca

SEQ ID NO: 1263 - DNA, 24 bp, Artificial Sequence
  Description of Artificial Sequence: Synthetic oligonucleotide
  5' Phos
tgaccgatcggaagcgatcggaag

SEQ ID NO: 1264 - DNA, 24 bp, Artificial Sequence
  Description of Artificial Sequence: Synthetic oligonucleotide
  5' Phos
tgaccgatctaccgcgatctaccg

SEQ ID NO: 1265 - DNA, 24 bp, Artificial Sequence
  Description of Artificial Sequence: Synthetic oligonucleotide
  5' Phos
tgaccgccaagcttcgccaagctt

SEQ ID NO: 1266 - DNA, 24 bp, Artificial Sequence
  Description of Artificial Sequence: Synthetic oligonucleotide
  5' Phos
tgaccgccagaattcgccagaatt

SEQ ID NO: 1267 - DNA, 24 bp, Artificial Sequence
  Description of Artificial Sequence: Synthetic oligonucleotide
  5' Phos
tgaccgcgaatggacgcgaatgga

SEQ ID NO: 1268 - DNA, 24 bp, Artificial Sequence
  Description of Artificial Sequence: Synthetic oligonucleotide
  5' Phos
tgaccgctcatcctcgctcatcct

SEQ ID NO: 1269 - DNA, 24 bp, Artificial Sequence
  Description of Artificial Sequence: Synthetic oligonucleotide
  5' Phos
tgaccgctcgaatgcgctcgaatg

SEQ ID NO: 1270 - DNA, 24 bp, Artificial Sequence
  Description of Artificial Sequence: Synthetic oligonucleotide
  5' Phos
tgaccgcttactatcgcttactat

SEQ ID NO: 1271 - DNA, 24 bp, Artificial Sequence
  Description of Artificial Sequence: Synthetic oligonucleotide
  5' Phos
tgaccgcttagcgtcgcttagcgt

SEQ ID NO: 1272 - DNA, 24 bp, Artificial Sequence
  Description of Artificial Sequence: Synthetic oligonucleotide
  5' Phos
tgaccggacttaagcggacttaag

SEQ ID NO: 1273 - DNA, 24 bp, Artificial Sequence
  Description of Artificial Sequence: Synthetic oligonucleotide
  5' Phos
tgaccggcgaacaacggcgaacaa

SEQ ID NO: 1274 - DNA, 24 bp, Artificial Sequence
  Description of Artificial Sequence: Synthetic oligonucleotide
  5' Phos
tgaccggcttggaacggcttggaa

SEQ ID NO: 1275 - DNA, 24 bp, Artificial Sequence
  Description of Artificial Sequence: Synthetic oligonucleotide
  5' Phos
tgaccggtagtgctcggtagtgct

SEQ ID NO: 1276 - DNA, 24 bp, Artificial Sequence
  Description of Artificial Sequence: Synthetic oligonucleotide
  5' Phos
tgaccggttacacacggttacaca

SEQ ID NO: 1277 - DNA, 24 bp, Artificial Sequence
  Description of Artificial Sequence: Synthetic oligonucleotide
  5' Phos
tgaccgtaccgtgtcgtaccgtgt

SEQ ID NO: 1278 - DNA, 24 bp, Artificial Sequence
  Description of Artificial Sequence: Synthetic oligonucleotide
  5' Phos
tgaccgtagagccacgtagagcca

SEQ ID NO: 1279 - DNA, 24 bp, Artificial Sequence
  Description of Artificial Sequence: Synthetic oligonucleotide
  5' Phos
tgaccgtaggactgcgtaggactg

SEQ ID NO: 1280 - DNA, 24 bp, Artificial Sequence
  Description of Artificial Sequence: Synthetic oligonucleotide
  5' Phos
tgaccgtatcacaacgtatcacaa

SEQ ID NO: 1281 - DNA, 24 bp, Artificial Sequence
  Description of Artificial Sequence: Synthetic oligonucleotide
  5' Phos
tgaccgtgttgcgacgtgttgcga

SEQ ID NO: 1282 - DNA, 24 bp, Artificial Sequence
  Description of Artificial Sequence: Synthetic oligonucleotide
  5' Phos
tgaccgttggtccacgttggtcca

SEQ ID NO: 1283 - DNA, 24 bp, Artificial Sequence
  Description of Artificial Sequence: Synthetic oligonucleotide
  5' Phos
tgacctacagccgactacagccga

SEQ ID NO: 1284 - DNA, 24 bp, Artificial Sequence
  Description of Artificial Sequence: Synthetic oligonucleotide
  5' Phos
tgacctacgcaaggctacgcaagg

SEQ ID NO: 1285 - DNA, 24 bp, Artificial Sequence
  Description of Artificial Sequence: Synthetic oligonucleotide
  5' Phos
tgacctacggtgtgctacggtgtg

SEQ ID NO: 1286 - DNA, 24 bp, Artificial Sequence
  Description of Artificial Sequence: Synthetic oligonucleotide
  5' Phos
tgacctacgttcctctacgttcct

SEQ ID NO: 1287 - DNA, 24 bp, Artificial Sequence
  Description of Artificial Sequence: Synthetic oligonucleotide
  5' Phos
tgacctagaggcagctagaggcag

SEQ ID NO: 1288 - DNA, 24 bp, Artificial Sequence
  Description of Artificial Sequence: Synthetic oligonucleotide
  5' Phos
tgacctaggtccagctaggtccag

SEQ ID NO: 1289 - DNA, 24 bp, Artificial Sequence
  Description of Artificial Sequence: Synthetic oligonucleotide
  5' Phos
tgacctaggtcgctctaggtcgct

SEQ ID NO: 1290 - DNA, 24 bp, Artificial Sequence
  Description of Artificial Sequence: Synthetic oligonucleotide
  5' Phos
tgacctatcgccgtctatcgccgt

SEQ ID NO: 1291 - DNA, 24 bp, Artificial Sequence
  Description of Artificial Sequence: Synthetic oligonucleotide
  5' Phos
tgacctatggatctctatggatct

SEQ ID NO: 1292 - DNA, 24 bp, Artificial Sequence
  Description of Artificial Sequence: Synthetic oligonucleotide
  5' Phos
tgacctcgcgagttctcgcgagtt

SEQ ID NO: 1293 - DNA, 24 bp, Artificial Sequence
  Description of Artificial Sequence: Synthetic oligonucleotide
  5' Phos
tgacctcgtggcaactcgtggcaa

SEQ ID NO: 1294 - DNA, 24 bp, Artificial Sequence
  Description of Artificial Sequence: Synthetic oligonucleotide
  5' Phos
tgacctctacaactctctacaact

SEQ ID NO: 1295 - DNA, 24 bp, Artificial Sequence
  Description of Artificial Sequence: Synthetic oligonucleotide
  5' Phos
tgacctctatatcgctctatatcg

SEQ ID NO: 1296 - DNA, 24 bp, Artificial Sequence
  Description of Artificial Sequence: Synthetic oligonucleotide
  5' Phos
tgacctctccttcactctccttca

SEQ ID NO: 1297 - DNA, 24 bp, Artificial Sequence
  Description of Artificial Sequence: Synthetic oligonucleotide
  5' Phos
tgacctctcttgcgctctcttgcg

SEQ ID NO: 1298 - DNA, 24 bp, Artificial Sequence
  Description of Artificial Sequence: Synthetic oligonucleotide
  5' Phos
tgacctctgcgttgctctgcgttg

SEQ ID NO: 1299 - DNA, 24 bp, Artificial Sequence
  Description of Artificial Sequence: Synthetic oligonucleotide
  5' Phos
tgacctgaatccagctgaatccag

SEQ ID NO: 1300 - DNA, 24 bp, Artificial Sequence
  Description of Artificial Sequence: Synthetic oligonucleotide
  5' Phos
tgacctgagcttggctgagcttgg

SEQ ID NO: 1301 - DNA, 24 bp, Artificial Sequence
  Description of Artificial Sequence: Synthetic oligonucleotide
  5' Phos
tgacctggatccgactggatccga

SEQ ID NO: 1302 - DNA, 24 bp, Artificial Sequence
  Description of Artificial Sequence: Synthetic oligonucleotide
  5' Phos
tgacctggtctgatctggtctgat

SEQ ID NO: 1303 - DNA, 24 bp, Artificial Sequence
  Description of Artificial Sequence: Synthetic oligonucleotide
  5' Phos
tgacctgtccacagctgtccacag

SEQ ID NO: 1304 - DNA, 24 bp, Artificial Sequence
  Description of Artificial Sequence: Synthetic oligonucleotide
  5' Phos
tgacctgtcctcctctgtcctcct

SEQ ID NO: 1305 - DNA, 24 bp, Artificial Sequence
  Description of Artificial Sequence: Synthetic oligonucleotide
  5' Phos
tgacctgtcggatgctgtcggatg

SEQ ID NO: 1306 - DNA, 24 bp, Artificial Sequence
  Description of Artificial Sequence: Synthetic oligonucleotide
  5' Phos
tgaccttcatctgacttcatctga

SEQ ID NO: 1307 - DNA, 24 bp, Artificial Sequence
  Description of Artificial Sequence: Synthetic oligonucleotide
  5' Phos
tgaccttcctgcgtcttcctgcgt

SEQ ID NO: 1308 - DNA, 24 bp, Artificial Sequence
  Description of Artificial Sequence: Synthetic oligonucleotide
  5' Phos
tgaccttcggctagcttcggctag

SEQ ID NO: 1309 - DNA, 24 bp, Artificial Sequence
  Description of Artificial Sequence: Synthetic oligonucleotide
  5' Phos
tgaccttcttatggcttcttatgg

SEQ ID NO: 1310 - DNA, 24 bp, Artificial Sequence
  Description of Artificial Sequence: Synthetic oligonucleotide
  5' Phos
tgaccttcttggatcttcttggat

SEQ ID NO: 1311 - DNA, 24 bp, Artificial Sequence
  Description of Artificial Sequence: Synthetic oligonucleotide
  5' Phos
tgaccttgcgatggcttgcgatgg

SEQ ID NO: 1312 - DNA, 24 bp, Artificial Sequence
  Description of Artificial Sequence: Synthetic oligonucleotide
  5' Phos
tgacgaacctcagcgaacctcagc

SEQ ID NO: 1313 - DNA, 24 bp, Artificial Sequence
  Description of Artificial Sequence: Synthetic oligonucleotide
  5' Phos
tgacgaacggattagaacggatta

SEQ ID NO: 1314 - DNA, 24 bp, Artificial Sequence
  Description of Artificial Sequence: Synthetic oligonucleotide
  5' Phos
tgacgaacgtcattgaacgtcatt

SEQ ID NO: 1315 - DNA, 24 bp, Artificial Sequence
  Description of Artificial Sequence: Synthetic oligonucleotide
  5' Phos
tgacgaactgatccgaactgatcc

SEQ ID NO: 1316 - DNA, 24 bp, Artificial Sequence
  Description of Artificial Sequence: Synthetic oligonucleotide
  5' Phos
tgacgacagcagtcgacagcagtc

SEQ ID NO: 1317 - DNA, 24 bp, Artificial Sequence
  Description of Artificial Sequence: Synthetic oligonucleotide
  5' Phos
tgacgaccgaatgtgaccgaatgt

SEQ ID NO: 1318 - DNA, 24 bp, Artificial Sequence
  Description of Artificial Sequence: Synthetic oligonucleotide
  5' Phos
tgacgacgccatcagacgccatca

SEQ ID NO: 1319 - DNA, 24 bp, Artificial Sequence
  Description of Artificial Sequence: Synthetic oligonucleotide
  5' Phos
tgacgacgcgatacgacgcgatac

SEQ ID NO: 1320 - DNA, 24 bp, Artificial Sequence
  Description of Artificial Sequence: Synthetic oligonucleotide
  5' Phos
tgacgacgctgtgagacgctgtga

SEQ ID NO: 1321 - DNA, 24 bp, Artificial Sequence
  Description of Artificial Sequence: Synthetic oligonucleotide
  5' Phos
tgacgacggaccttgacggacctt

SEQ ID NO: 1322 - DNA, 24 bp, Artificial Sequence
  Description of Artificial Sequence: Synthetic oligonucleotide
  5' Phos
tgacgacggagtctgacggagtct

SEQ ID NO: 1323 - DNA, 24 bp, Artificial Sequence
  Description of Artificial Sequence: Synthetic oligonucleotide
  5' Phos
tgacgagcacaaccgagcacaacc

SEQ ID NO: 1324 - DNA, 24 bp, Artificial Sequence
  Description of Artificial Sequence: Synthetic oligonucleotide
  5' Phos
tgacgaggaagaccgaggaagacc

SEQ ID NO: 1325 - DNA, 24 bp, Artificial Sequence
  Description of Artificial Sequence: Synthetic oligonucleotide
  5' Phos
tgacgaggcacgatgaggcacgat

SEQ ID NO: 1326 - DNA, 24 bp, Artificial Sequence
  Description of Artificial Sequence: Synthetic oligonucleotide
  5' Phos
tgacgaggtgaagcgaggtgaagc

SEQ ID NO: 1327 - DNA, 24 bp, Artificial Sequence
  Description of Artificial Sequence: Synthetic oligonucleotide
  5' Phos
tgacgagtcacaccgagtcacacc

SEQ ID NO: 1328 - DNA, 24 bp, Artificial Sequence
  Description of Artificial Sequence: Synthetic oligonucleotide
  5' Phos
tgacgagtccagacgagtccagac

SEQ ID NO: 1329 - DNA, 24 bp, Artificial Sequence
  Description of Artificial Sequence: Synthetic oligonucleotide
  5' Phos
tgacgataacctgtgataacctgt

SEQ ID NO: 1330 - DNA, 24 bp, Artificial Sequence
  Description of Artificial Sequence: Synthetic oligonucleotide
  5' Phos
tgacgatccaaggcgatccaaggc

SEQ ID NO: 1331 - DNA, 24 bp, Artificial Sequence
  Description of Artificial Sequence: Synthetic oligonucleotide
  5' Phos
tgacgatcgagccagatcgagcca

SEQ ID NO: 1332 - DNA, 24 bp, Artificial Sequence
  Description of Artificial Sequence: Synthetic oligonucleotide
  5' Phos
tgacgatggcaatcgatggcaatc

SEQ ID NO: 1333 - DNA, 24 bp, Artificial Sequence
  Description of Artificial Sequence: Synthetic oligonucleotide
  5' Phos
tgacgattaccaacgattaccaac

SEQ ID NO: 1334 - DNA, 24 bp, Artificial Sequence
  Description of Artificial Sequence: Synthetic oligonucleotide
  5' Phos
tgacgattcgtcttgattcgtctt

SEQ ID NO: 1335 - DNA, 24 bp, Artificial Sequence
  Description of Artificial Sequence: Synthetic oligonucleotide
  5' Phos
tgacgattgttggagattgttgga

SEQ ID NO: 1336 - DNA, 24 bp, Artificial Sequence
  Description of Artificial Sequence: Synthetic oligonucleotide
  5' Phos
tgacgcaacacggagcaacacgga

SEQ ID NO: 1337 - DNA, 24 bp, Artificial Sequence
  Description of Artificial Sequence: Synthetic oligonucleotide
  5' Phos
tgacgcaatggtacgcaatggtac

SEQ ID NO: 1338 - DNA, 24 bp, Artificial Sequence
  Description of Artificial Sequence: Synthetic oligonucleotide
  5' Phos
tgacgcaccacattgcaccacatt

SEQ ID NO: 1339 - DNA, 24 bp, Artificial Sequence
  Description of Artificial Sequence: Synthetic oligonucleotide
  5' Phos
tgacgcagattggcgcagattggc

SEQ ID NO: 1340 - DNA, 24 bp, Artificial Sequence
  Description of Artificial Sequence: Synthetic oligonucleotide
  5' Phos
tgacgcaggatagcgcaggatagc

SEQ ID NO: 1341 - DNA, 24 bp, Artificial Sequence
  Description of Artificial Sequence: Synthetic oligonucleotide
  5' Phos
tgacgcattaatccgcattaatcc

SEQ ID NO: 1342 - DNA, 24 bp, Artificial Sequence
  Description of Artificial Sequence: Synthetic oligonucleotide
  5' Phos
tgacgccaccatctgccaccatct

SEQ ID NO: 1343 - DNA, 24 bp, Artificial Sequence
  Description of Artificial Sequence: Synthetic oligonucleotide
  5' Phos
tgacgccagataccgccagatacc

SEQ ID NO: 1344 - DNA, 24 bp, Artificial Sequence
  Description of Artificial Sequence: Synthetic oligonucleotide
  5' Phos
tgacgccatagatagccatagata

SEQ ID NO: 1345 - DNA, 24 bp, Artificial Sequence
  Description of Artificial Sequence: Synthetic oligonucleotide
  5' Phos
tcccgccattggacgccattggac

SEQ ID NO: 1346 - DNA, 24 bp, Artificial Sequence
  Description of Artificial Sequence: Synthetic oligonucleotide
  5' Phos
tcccgccgaatcctgccgaatcct

SEQ ID NO: 1347 - DNA, 24 bp, Artificial Sequence
  Description of Artificial Sequence: Synthetic oligonucleotide
  5' Phos
tcccgccgtgtctagccgtgtcta

SEQ ID NO: 1348 - DNA, 24 bp, Artificial Sequence
  Description of Artificial Sequence: Synthetic oligonucleotide
  5' Phos
tcccgccttatctcgccttatctc

SEQ ID NO: 1349 - DNA, 24 bp, Artificial Sequence
  Description of Artificial Sequence: Synthetic oligonucleotide
  5' Phos
tcccgccttcgcttgccttcgctt

SEQ ID NO: 1350 - DNA, 24 bp, Artificial Sequence
  Description of Artificial Sequence: Synthetic oligonucleotide
  5' Phos
tcccgcgaagtggtgcgaagtggt

SEQ ID NO: 1351 - DNA, 24 bp, Artificial Sequence
  Description of Artificial Sequence: Synthetic oligonucleotide
  5' Phos
tcccgcgaatatctgcgaatatct

SEQ ID NO: 1352 - DNA, 24 bp, Artificial Sequence
  Description of Artificial Sequence: Synthetic oligonucleotide
  5' Phos
tcccgcgctgatacgcgctgatac

SEQ ID NO: 1353 - DNA, 24 bp, Artificial Sequence
  Description of Artificial Sequence: Synthetic oligonucleotide
  5' Phos
tcccgcggacttctgcggacttct

SEQ ID NO: 1354 - DNA, 24 bp, Artificial Sequence
  Description of Artificial Sequence: Synthetic oligonucleotide
  5' Phos
tcccgcggataagtgcggataagt

SEQ ID NO: 1355 - DNA, 24 bp, Artificial Sequence
  Description of Artificial Sequence: Synthetic oligonucleotide
  5' Phos
tcccgcggtccattgcggtccatt

SEQ ID NO: 1356 - DNA, 24 bp, Artificial Sequence
  Description of Artificial Sequence: Synthetic oligonucleotide
  5' Phos
tcccgctcagttaagctcagttaa

SEQ ID NO: 1357 - DNA, 24 bp, Artificial Sequence
  Description of Artificial Sequence: Synthetic oligonucleotide
  5' Phos
tcccgctcattctagctcattcta

SEQ ID NO: 1358 - DNA, 24 bp, Artificial Sequence
  Description of Artificial Sequence: Synthetic oligonucleotide
  5' Phos
tcccgctcctaagcgctcctaagc

SEQ ID NO: 1359 - DNA, 24 bp, Artificial Sequence
  Description of Artificial Sequence: Synthetic oligonucleotide
  5' Phos
tcccgctggaaggagctggaagga

SEQ ID NO: 1360 - DNA, 24 bp, Artificial Sequence
  Description of Artificial Sequence: Synthetic oligonucleotide
  5' Phos
tcccggaacaatgtggaacaatgt

SEQ ID NO: 1361 - DNA, 24 bp, Artificial Sequence
  Description of Artificial Sequence: Synthetic oligonucleotide
  5' Phos
tcccggaacatctcggaacatctc

SEQ ID NO: 1362 - DNA, 24 bp, Artificial Sequence
  Description of Artificial Sequence: Synthetic oligonucleotide
  5' Phos
tcccggaaccagtaggaaccagta

SEQ ID NO: 1363 - DNA, 24 bp, Artificial Sequence
  Description of Artificial Sequence: Synthetic oligonucleotide
  5' Phos
tcccggaacgacttggaacgactt

SEQ ID NO: 1364 - DNA, 24 bp, Artificial Sequence
  Description of Artificial Sequence: Synthetic oligonucleotide
  5' Phos
tcccggaagatgatggaagatgat

SEQ ID NO: 1365 - DNA, 24 bp, Artificial Sequence
  Description of Artificial Sequence: Synthetic oligonucleotide
  5' Phos
tcccggaaggagacggaaggagac

SEQ ID NO: 1366 - DNA, 24 bp, Artificial Sequence
  Description of Artificial Sequence: Synthetic oligonucleotide
  5' Phos
tcccggaagtggtaggaagtggta

SEQ ID NO: 1367 - DNA, 24 bp, Artificial Sequence
  Description of Artificial Sequence: Synthetic oligonucleotide
  5' Phos
tcccggaatcaggtggaatcaggt

SEQ ID NO: 1368 - DNA, 24 bp, Artificial Sequence
  Description of Artificial Sequence: Synthetic oligonucleotide
  5' Phos
tcccggaatgtgtaggaatgtgta

SEQ ID NO: 1369 - DNA, 24 bp, Artificial Sequence
  Description of Artificial Sequence: Synthetic oligonucleotide
  5' Phos
tcccggagataggaggagatagga

SEQ ID NO: 1370 - DNA, 24 bp, Artificial Sequence
  Description of Artificial Sequence: Synthetic oligonucleotide
  5' Phos
tcccggagcaatccggagcaatcc

SEQ ID NO: 1371 - DNA, 24 bp, Artificial Sequence
  Description of Artificial Sequence: Synthetic oligonucleotide
  5' Phos
tcccggaggacatcggaggacatc

SEQ ID NO: 1372 - DNA, 24 bp, Artificial Sequence
  Description of Artificial Sequence: Synthetic oligonucleotide
  5' Phos
tcccggcaatagccggcaatagcc

SEQ ID NO: 1373 - DNA, 24 bp, Artificial Sequence
  Description of Artificial Sequence: Synthetic oligonucleotide
  5' Phos
tcccggcagaaggaggcagaagga

SEQ ID NO: 1374 - DNA, 24 bp, Artificial Sequence
  Description of Artificial Sequence: Synthetic oligonucleotide
  5' Phos
tcccggcaggaataggcaggaata

SEQ ID NO: 1375 - DNA, 24 bp, Artificial Sequence
  Description of Artificial Sequence: Synthetic oligonucleotide
  5' Phos
tcccggcatacaccggcatacacc

SEQ ID NO: 1376 - DNA, 24 bp, Artificial Sequence
  Description of Artificial Sequence: Synthetic oligonucleotide
  5' Phos
tcccggccgttgtaggccgttgta

SEQ ID NO: 1377 - DNA, 24 bp, Artificial Sequence
  Description of Artificial Sequence: Synthetic oligonucleotide
  5' Phos
tcccggcctgcttaggcctgctta

SEQ ID NO: 1378 - DNA, 24 bp, Artificial Sequence
  Description of Artificial Sequence: Synthetic oligonucleotide
  5' Phos
tcccggcgaggtaaggcgaggtaa

SEQ ID NO: 1379 - DNA, 24 bp, Artificial Sequence
  Description of Artificial Sequence: Synthetic oligonucleotide
  5' Phos
tcccggcgtgacatggcgtgacat

SEQ ID NO: 1380 - DNA, 24 bp, Artificial Sequence
  Description of Artificial Sequence: Synthetic oligonucleotide
  5' Phos
tcccggctccaagaggctccaaga

SEQ ID NO: 1381 - DNA, 24 bp, Artificial Sequence
  Description of Artificial Sequence: Synthetic oligonucleotide
  5' Phos
tcccggctgctcaaggctgctcaa

SEQ ID NO: 1382 - DNA, 24 bp, Artificial Sequence
  Description of Artificial Sequence: Synthetic oligonucleotide
  5' Phos
tcccggctgtgcttggctgtgctt

SEQ ID NO: 1383 - DNA, 24 bp, Artificial Sequence
  Description of Artificial Sequence: Synthetic oligonucleotide
  5' Phos
tcccggcttctgtcggcttctgtc

SEQ ID NO: 1384 - DNA, 24 bp, Artificial Sequence
  Description of Artificial Sequence: Synthetic oligonucleotide
  5' Phos
tcccggtatcgcttggtatcgctt

SEQ ID NO: 1385 - DNA, 24 bp, Artificial Sequence
  Description of Artificial Sequence: Synthetic oligonucleotide
  5' Phos
tcccggtccttccaggtccttcca

SEQ ID NO: 1386 - DNA, 24 bp, Artificial Sequence
  Description of Artificial Sequence: Synthetic oligonucleotide
  5' Phos
tcccggtcggttatggtcggttat

SEQ ID NO: 1387 - DNA, 24 bp, Artificial Sequence
  Description of Artificial Sequence: Synthetic oligonucleotide
  5' Phos
tcccggtctgacgaggtctgacga

SEQ ID NO: 1388 - DNA, 24 bp, Artificial Sequence
  Description of Artificial Sequence: Synthetic oligonucleotide
  5' Phos
tcccggtgaccactggtgaccact

SEQ ID NO: 1389 - DNA, 24 bp, Artificial Sequence
  Description of Artificial Sequence: Synthetic oligonucleotide
  5' Phos
tcccggtgagtccaggtgagtcca

SEQ ID NO: 1390 - DNA, 24 bp, Artificial Sequence
  Description of Artificial Sequence: Synthetic oligonucleotide
  5' Phos
tcccggtggcgaatggtggcgaat

SEQ ID NO: 1391 - DNA, 24 bp, Artificial Sequence
  Description of Artificial Sequence: Synthetic oligonucleotide
  5' Phos
tcccggtgtatatcggtgtatatc

SEQ ID NO: 1392 - DNA, 24 bp, Artificial Sequence
  Description of Artificial Sequence: Synthetic oligonucleotide
  5' Phos
tcccggttccttaaggttccttaa

SEQ ID NO: 1393 - DNA, 24 bp, Artificial Sequence
  Description of Artificial Sequence: Synthetic oligonucleotide
  5' Phos
tcccggttctacaaggttctacaa

SEQ ID NO: 1394 - DNA, 24 bp, Artificial Sequence
  Description of Artificial Sequence: Synthetic oligonucleotide
  5' Phos
tcccggttggcgttggttggcgtt

SEQ ID NO: 1395 - DNA, 24 bp, Artificial Sequence
  Description of Artificial Sequence: Synthetic oligonucleotide
  5' Phos
tcccgtaacacgctgtaacacgct

SEQ ID NO: 1396 - DNA, 24 bp, Artificial Sequence
  Description of Artificial Sequence: Synthetic oligonucleotide
  5' Phos
tcccgtagagcgacgtagagcgac

SEQ ID NO: 1397 - DNA, 24 bp, Artificial Sequence
  Description of Artificial Sequence: Synthetic oligonucleotide
  5' Phos
tcccgtagctgctcgtagctgctc

SEQ ID NO: 1398 - DNA, 24 bp, Artificial Sequence
  Description of Artificial Sequence: Synthetic oligonucleotide
  5' Phos
tcccgtaggtggatgtaggtggat

SEQ ID NO: 1399 - DNA, 24 bp, Artificial Sequence
  Description of Artificial Sequence: Synthetic oligonucleotide
  5' Phos
tcccgtagtcagccgtagtcagcc

SEQ ID NO: 1400 - DNA, 24 bp, Artificial Sequence
  Description of Artificial Sequence: Synthetic oligonucleotide
  5' Phos
tcccgtccttccacgtccttccac

SEQ ID NO: 1401 - DNA, 24 bp, Artificial Sequence
  Description of Artificial Sequence: Synthetic oligonucleotide
  5' Phos
tcccgtcgagcagtgtcgagcagt

SEQ ID NO: 1402 - DNA, 24 bp, Artificial Sequence
  Description of Artificial Sequence: Synthetic oligonucleotide
  5' Phos
tcccgtcgcacagagtcgcacaga

SEQ ID NO: 1403 - DNA, 24 bp, Artificial Sequence
  Description of Artificial Sequence: Synthetic oligonucleotide
  5' Phos
tcccgtcgcacttcgtcgcacttc

SEQ ID NO: 1404 - DNA, 24 bp, Artificial Sequence
  Description of Artificial Sequence: Synthetic oligonucleotide
  5' Phos
tcccgtctggtggtgtctggtggt

SEQ ID NO: 1405 - DNA, 24 bp, Artificial Sequence
  Description of Artificial Sequence: Synthetic oligonucleotide
  5' Phos
tcccgtgaactgttgtgaactgtt

SEQ ID NO: 1406 - DNA, 24 bp, Artificial Sequence
  Description of Artificial Sequence: Synthetic oligonucleotide
  5' Phos
tcccgtgccatcctgtgccatcct

SEQ ID NO: 1407 - DNA, 24 bp, Artificial Sequence
  Description of Artificial Sequence: Synthetic oligonucleotide
  5' Phos
tcccgtgcgtgaacgtgcgtgaac

SEQ ID NO: 1408 - DNA, 24 bp, Artificial Sequence
  Description of Artificial Sequence: Synthetic oligonucleotide
  5' Phos
tcccgtggagatgtgtggagatgt

SEQ ID NO: 1409 - DNA, 24 bp, Artificial Sequence
  Description of Artificial Sequence: Synthetic oligonucleotide
  5' Phos
tcccgtggtgcaacgtggtgcaac

SEQ ID NO: 1410 - DNA, 24 bp, Artificial Sequence
  Description of Artificial Sequence: Synthetic oligonucleotide
  5' Phos
tcccgtgtcgttaagtgtcgttaa

SEQ ID NO: 1411 - DNA, 24 bp, Artificial Sequence
  Description of Artificial Sequence: Synthetic oligonucleotide
  5' Phos
tcccgtgtctcaatgtgtctcaat

SEQ ID NO: 1412 - DNA, 24 bp, Artificial Sequence
  Description of Artificial Sequence: Synthetic oligonucleotide
  5' Phos
tcccgtgtgatgacgtgtgatgac

SEQ ID NO: 1413 - DNA, 24 bp, Artificial Sequence
  Description of Artificial Sequence: Synthetic oligonucleotide
  5' Phos
tcccgttagatcgcgttagatcgc

SEQ ID NO: 1414 - DNA, 24 bp, Artificial Sequence
  Description of Artificial Sequence: Synthetic oligonucleotide
  5' Phos
tccctaagccgatataagccgata

SEQ ID NO: 1415 - DNA, 24 bp, Artificial Sequence
  Description of Artificial Sequence: Synthetic oligonucleotide
  5' Phos
tccctaaggacacctaaggacacc

SEQ ID NO: 1416 - DNA, 24 bp, Artificial Sequence
  Description of Artificial Sequence: Synthetic oligonucleotide
  5' Phos
tccctaaggccaagtaaggccaag

SEQ ID NO: 1417 - DNA, 24 bp, Artificial Sequence
  Description of Artificial Sequence: Synthetic oligonucleotide
  5' Phos
tccctaatagcgagtaatagcgag

SEQ ID NO: 1418 - DNA, 24 bp, Artificial Sequence
  Description of Artificial Sequence: Synthetic oligonucleotide
  5' Phos
tccctaatggccggtaatggccgg

SEQ ID NO: 1419 - DNA, 24 bp, Artificial Sequence
  Description of Artificial Sequence: Synthetic oligonucleotide
  5' Phos
tccctaccattggataccattgga

SEQ ID NO: 1420 - DNA, 24 bp, Artificial Sequence
  Description of Artificial Sequence: Synthetic oligonucleotide
  5' Phos
tccctacgaccacctacgaccacc

SEQ ID NO: 1421 - DNA, 24 bp, Artificial Sequence
  Description of Artificial Sequence: Synthetic oligonucleotide
  5' Phos
tccctacgaccttatacgacctta

SEQ ID NO: 1422 - DNA, 24 bp, Artificial Sequence
  Description of Artificial Sequence: Synthetic oligonucleotide
  5' Phos
tccctacgtgattctacgtgattc

SEQ ID NO: 1423 - DNA, 24 bp, Artificial Sequence
  Description of Artificial Sequence: Synthetic oligonucleotide
  5' Phos
tccctactagtcagtactagtcag

SEQ ID NO: 1424 - DNA, 24 bp, Artificial Sequence
  Description of Artificial Sequence: Synthetic oligonucleotide
  5' Phos
tccctactgacaagtactgacaag

SEQ ID NO: 1425 - DNA, 24 bp, Artificial Sequence
  Description of Artificial Sequence: Synthetic oligonucleotide
  5' Phos
tccctactgctggctactgctggc

SEQ ID NO: 1426 - DNA, 24 bp, Artificial Sequence
  Description of Artificial Sequence: Synthetic oligonucleotide
  5' Phos
tccctagaccgtaatagaccgtaa

SEQ ID NO: 1427 - DNA, 24 bp, Artificial Sequence
  Description of Artificial Sequence: Synthetic oligonucleotide
  5' Phos
tccctagacgaagatagacgaaga

SEQ ID NO: 1428 - DNA, 24 bp, Artificial Sequence
  Description of Artificial Sequence: Synthetic oligonucleotide
  5' Phos
tccctagcctagcctagcctagcc

SEQ ID NO: 1429 - DNA, 24 bp, Artificial Sequence
  Description of Artificial Sequence: Synthetic oligonucleotide
  5' Phos
tccctagcgaattctagcgaattc

SEQ ID NO: 1430 - DNA, 24 bp, Artificial Sequence
  Description of Artificial Sequence: Synthetic oligonucleotide
  5' Phos
tccctagctgccactagctgccac

SEQ ID NO: 1431 - DNA, 24 bp, Artificial Sequence
  Description of Artificial Sequence: Synthetic oligonucleotide
  5' Phos
tccctaggtaggcataggtaggca

SEQ ID NO: 1432 - DNA, 24 bp, Artificial Sequence
  Description of Artificial Sequence: Synthetic oligonucleotide
  5' Phos
tccctagtcgttactagtcgttac

SEQ ID NO: 1433 - DNA, 24 bp, Artificial Sequence
  Description of Artificial Sequence: Synthetic oligonucleotide
  5' Phos
tccctagtgcgaagtagtgcgaag

SEQ ID NO: 1434 - DNA, 24 bp, Artificial Sequence
  Description of Artificial Sequence: Synthetic oligonucleotide
  5' Phos
tccctagtggacgctagtggacgc

SEQ ID NO: 1435 - DNA, 24 bp, Artificial Sequence
  Description of Artificial Sequence: Synthetic oligonucleotide
  5' Phos
tccctataacggtgtataacggtg

SEQ ID NO: 1436 - DNA, 24 bp, Artificial Sequence
  Description of Artificial Sequence: Synthetic oligonucleotide
  5' Phos
tccctatagaaccgtatagaaccg

SEQ ID NO: 1437 - DNA, 24 bp, Artificial Sequence
  Description of Artificial Sequence: Synthetic oligonucleotide
  5' Phos
tccctatccgaaggtatccgaagg

SEQ ID NO: 1438 - DNA, 24 bp, Artificial Sequence
  Description of Artificial Sequence: Synthetic oligonucleotide
  5' Phos
tccctatcggagcctatcggagcc

SEQ ID NO: 1439 - DNA, 24 bp, Artificial Sequence
  Description of Artificial Sequence: Synthetic oligonucleotide
  5' Phos
tccctatcggcctgtatcggcctg

SEQ ID NO: 1440 - DNA, 24 bp, Artificial Sequence
  Description of Artificial Sequence: Synthetic oligonucleotide
  5' Phos
tccctatcgtcggctatcgtcggc

SEQ ID NO: 1441 - DNA, 24 bp, Artificial Sequence
  Description of Artificial Sequence: Synthetic oligonucleotide
  5' Phos
tccctatgcgccactatgcgccac

SEQ ID NO: 1442 - DNA, 24 bp, Artificial Sequence
  Description of Artificial Sequence: Synthetic oligonucleotide
  5' Phos
tccctatggccgtctatggccgtc

SEQ ID NO: 1443 - DNA, 24 bp, Artificial Sequence
  Description of Artificial Sequence: Synthetic oligonucleotide
  5' Phos
tccctattcttccgtattcttccg

SEQ ID NO: 1444 - DNA, 24 bp, Artificial Sequence
  Description of Artificial Sequence: Synthetic oligonucleotide
  5' Phos
tccctcaagcaacgtcaagcaacg

SEQ ID NO: 1445 - DNA, 24 bp, Artificial Sequence
  Description of Artificial Sequence: Synthetic oligonucleotide
  5' Phos
tccctcaagcagtctcaagcagtc

SEQ ID NO: 1446 - DNA, 24 bp, Artificial Sequence
  Description of Artificial Sequence: Synthetic oligonucleotide
  5' Phos
tccctcaagtccgatcaagtccga

SEQ ID NO: 1447 - DNA, 24 bp, Artificial Sequence
  Description of Artificial Sequence: Synthetic oligonucleotide
  5' Phos
tccctcaatcgagatcaatcgaga

SEQ ID NO: 1448 - DNA, 24 bp, Artificial Sequence
  Description of Artificial Sequence: Synthetic oligonucleotide
  5' Phos
tccctcaatgtcgatcaatgtcga

SEQ ID NO: 1449 - DNA, 24 bp, Artificial Sequence
  Description of Artificial Sequence: Synthetic oligonucleotide
  5' Phos
tccctcactgaggctcactgaggc

SEQ ID NO: 1450 - DNA, 24 bp, Artificial Sequence
  Description of Artificial Sequence: Synthetic oligonucleotide
  5' Phos
tccctcagcgagactcagcgagac

SEQ ID NO: 1451 - DNA, 24 bp, Artificial Sequence
  Description of Artificial Sequence: Synthetic oligonucleotide
  5' Phos
tccctcaggaggaatcaggaggaa

SEQ ID NO: 1452 - DNA, 24 bp, Artificial Sequence
  Description of Artificial Sequence: Synthetic oligonucleotide
  5' Phos
tccctcaggcacagtcaggcacag

SEQ ID NO: 1453 - DNA, 24 bp, Artificial Sequence
  Description of Artificial Sequence: Synthetic oligonucleotide
  5' Phos
tccctcaggcttcctcaggcttcc

SEQ ID NO: 1454 - DNA, 24 bp, Artificial Sequence
  Description of Artificial Sequence: Synthetic oligonucleotide
  5' Phos
tccctccacactcgtccacactcg

SEQ ID NO: 1455 - DNA, 24 bp, Artificial Sequence
  Description of Artificial Sequence: Synthetic oligonucleotide
  5' Phos
tccctccacagcgatccacagcga

SEQ ID NO: 1456 - DNA, 24 bp, Artificial Sequence
  Description of Artificial Sequence: Synthetic oligonucleotide
  5' Phos
tccctccagctgcatccagctgca

SEQ ID NO: 1457 - DNA, 24 bp, Artificial Sequence
  Description of Artificial Sequence: Synthetic oligonucleotide
  5' Phos
tccctccataatcctccataatcc

SEQ ID NO: 1458 - DNA, 24 bp, Artificial Sequence
  Description of Artificial Sequence: Synthetic oligonucleotide
  5' Phos
tccctccggaccaatccggaccaa

SEQ ID NO: 1459 - DNA, 24 bp, Artificial Sequence
  Description of Artificial Sequence: Synthetic oligonucleotide
  5' Phos
tccctccgtaacggtccgtaacgg

SEQ ID NO: 1460 - DNA, 24 bp, Artificial Sequence
  Description of Artificial Sequence: Synthetic oligonucleotide
  5' Phos
tccctccgtaggtctccgtaggtc

SEQ ID NO: 1461 - DNA, 24 bp, Artificial Sequence
  Description of Artificial Sequence: Synthetic oligonucleotide
  5' Phos
tccctccgtccaagtccgtccaag

SEQ ID NO: 1462 - DNA, 24 bp, Artificial Sequence
  Description of Artificial Sequence: Synthetic oligonucleotide
  5' Phos
tccctcctgaaccgtcctgaaccg

SEQ ID NO: 1463 - DNA, 24 bp, Artificial Sequence
  Description of Artificial Sequence: Synthetic oligonucleotide
  5' Phos
tccctcctggcatgtcctggcatg

SEQ ID NO: 1464 - DNA, 24 bp, Artificial Sequence
  Description of Artificial Sequence: Synthetic oligonucleotide
  5' Phos
tccctcgcgctacatcgcgctaca

SEQ ID NO: 1465 - DNA, 24 bp, Artificial Sequence
  Description of Artificial Sequence: Synthetic oligonucleotide
  5' Phos
tccctcggttaccatcggttacca

SEQ ID NO: 1466 - DNA, 24 bp, Artificial Sequence
  Description of Artificial Sequence: Synthetic oligonucleotide
  5' Phos
tccctcgtccgtcatcgtccgtca

SEQ ID NO: 1467 - DNA, 24 bp, Artificial Sequence
  Description of Artificial Sequence: Synthetic oligonucleotide
  5' Phos
tccctcgtcctcagtcgtcctcag

SEQ ID NO: 1468 - DNA, 24 bp, Artificial Sequence
  Description of Artificial Sequence: Synthetic oligonucleotide
  5' Phos
tccctctaccgctctctaccgctc

SEQ ID NO: 1469 - DNA, 24 bp, Artificial Sequence
  Description of Artificial Sequence: Synthetic oligonucleotide
  5' Phos
tccctctagctcggtctagctcgg

SEQ ID NO: 1470 - DNA, 24 bp, Artificial Sequence
  Description of Artificial Sequence: Synthetic oligonucleotide
  5' Phos
tccctctcggctgatctcggctga

SEQ ID NO: 1471 - DNA, 24 bp, Artificial Sequence
  Description of Artificial Sequence: Synthetic oligonucleotide
  5' Phos
tccctctcggtcagtctcggtcag

SEQ ID NO: 1472 - DNA, 24 bp, Artificial Sequence
  Description of Artificial Sequence: Synthetic oligonucleotide
  5' Phos
tccctctctagatctctctagatc

SEQ ID NO: 1473 - DNA, 24 bp, Artificial Sequence
  Description of Artificial Sequence: Synthetic oligonucleotide
  5' Phos
tccctctgaccgcatctgaccgca

SEQ ID NO: 1474 - DNA, 24 bp, Artificial Sequence
  Description of Artificial Sequence: Synthetic oligonucleotide
  5' Phos
tccctctggacagatctggacaga

SEQ ID NO: 1475 - DNA, 24 bp, Artificial Sequence
  Description of Artificial Sequence: Synthetic oligonucleotide
  5' Phos
tccctctggataagtctggataag

SEQ ID NO: 1476 - DNA, 24 bp, Artificial Sequence
  Description of Artificial Sequence: Synthetic oligonucleotide
  5' Phos
tccctcttacggcctcttacggcc

SEQ ID NO: 1477 - DNA, 24 bp, Artificial Sequence
  Description of Artificial Sequence: Synthetic oligonucleotide
  5' Phos
tccctcttgcatactcttgcatac

SEQ ID NO: 1478 - DNA, 24 bp, Artificial Sequence
  Description of Artificial Sequence: Synthetic oligonucleotide
  5' Phos
tccctgaacttggatgaacttgga

SEQ ID NO: 1479 - DNA, 24 bp, Artificial Sequence
  Description of Artificial Sequence: Synthetic oligonucleotide
  5' Phos
tccctgacacagcgtgacacagcg

SEQ ID NO: 1480 - DNA, 24 bp, Artificial Sequence
  Description of Artificial Sequence: Synthetic oligonucleotide
  5' Phos
tccctgacaggtcctgacaggtcc

SEQ ID NO: 1481 - DNA, 24 bp, Artificial Sequence
  Description of Artificial Sequence: Synthetic oligonucleotide
  5' Phos
tccctgaccttccgtgaccttccg

SEQ ID NO: 1482 - DNA, 24 bp, Artificial Sequence
  Description of Artificial Sequence: Synthetic oligonucleotide
  5' Phos
tccctgacgtcggatgacgtcgga

SEQ ID NO: 1483 - DNA, 24 bp, Artificial Sequence
  Description of Artificial Sequence: Synthetic oligonucleotide
  5' Phos
tccctgactatctctgactatctc

SEQ ID NO: 1484 - DNA, 24 bp, Artificial Sequence
  Description of Artificial Sequence: Synthetic oligonucleotide
  5' Phos
tccctgactccaggtgactccagg

SEQ ID NO: 1485 - DNA, 24 bp, Artificial Sequence
  Description of Artificial Sequence: Synthetic oligonucleotide
  5' Phos
tccctgagagcaggtgagagcagg

SEQ ID NO: 1486 - DNA, 24 bp, Artificial Sequence
  Description of Artificial Sequence: Synthetic oligonucleotide
  5' Phos
tccctgagcctccatgagcctcca

SEQ ID NO: 1487 - DNA, 24 bp, Artificial Sequence
  Description of Artificial Sequence: Synthetic oligonucleotide
  5' Phos
tccctgagtatggatgagtatgga

SEQ ID NO: 1488 - DNA, 24 bp, Artificial Sequence
  Description of Artificial Sequence: Synthetic oligonucleotide
  5' Phos
tccctgcaacatactgcaacatac

SEQ ID NO: 1489 - DNA, 24 bp, Artificial Sequence
  Description of Artificial Sequence: Synthetic oligonucleotide
  5' Phos
tccctgcgctgtagtgcgctgtag

SEQ ID NO: 1490 - DNA, 24 bp, Artificial Sequence
  Description of Artificial Sequence: Synthetic oligonucleotide
  5' Phos
tccctgctaaccggtgctaaccgg

SEQ ID NO: 1491 - DNA, 24 bp, Artificial Sequence
  Description of Artificial Sequence: Synthetic oligonucleotide
  5' Phos
tccctgctccactgtgctccactg

SEQ ID NO: 1492 - DNA, 24 bp, Artificial Sequence
  Description of Artificial Sequence: Synthetic oligonucleotide
  5' Phos
tccctggaaggagctggaaggagc

SEQ ID NO: 1493 - DNA, 24 bp, Artificial Sequence
  Description of Artificial Sequence: Synthetic oligonucleotide
  5' Phos
tccctggcagtgactggcagtgac

SEQ ID NO: 1494 - DNA, 24 bp, Artificial Sequence
  Description of Artificial Sequence: Synthetic oligonucleotide
  5' Phos
tccctggcatcagctggcatcagc

SEQ ID NO: 1495 - DNA, 24 bp, Artificial Sequence
  Description of Artificial Sequence: Synthetic oligonucleotide
  5' Phos
tccctggccttatatggccttata

SEQ ID NO: 1496 - DNA, 24 bp, Artificial Sequence
  Description of Artificial Sequence: Synthetic oligonucleotide
  5' Phos
tccctggcgaagcatggcgaagca

SEQ ID NO: 1497 - DNA, 24 bp, Artificial Sequence
  Description of Artificial Sequence: Synthetic oligonucleotide
  5' Phos
tccctggcttaagatggcttaaga

SEQ ID NO: 1498 - DNA, 24 bp, Artificial Sequence
  Description of Artificial Sequence: Synthetic oligonucleotide
  5' Phos
tccctggtcagctctggtcagctc

SEQ ID NO: 1499 - DNA, 24 bp, Artificial Sequence
  Description of Artificial Sequence: Synthetic oligonucleotide
  5' Phos
tccctggttccaactggttccaac

SEQ ID NO: 1500 - DNA, 24 bp, Artificial Sequence
  Description of Artificial Sequence: Synthetic oligonucleotide
  5' Phos
tccctggttggtaatggttggtaa

SEQ ID NO: 1501 - DNA, 24 bp, Artificial Sequence
  Description of Artificial Sequence: Synthetic oligonucleotide
  5' Phos
tccctgtacgcgcatgtacgcgca

SEQ ID NO: 1502 - DNA, 24 bp, Artificial Sequence
  Description of Artificial Sequence: Synthetic oligonucleotide
  5' Phos
tccctgtacgctggtgtacgctgg

SEQ ID NO: 1503 - DNA, 24 bp, Artificial Sequence
  Description of Artificial Sequence: Synthetic oligonucleotide
  5' Phos
tccctgtagcattgtgtagcattg

SEQ ID NO: 1504 - DNA, 24 bp, Artificial Sequence
  Description of Artificial Sequence: Synthetic oligonucleotide
  5' Phos
tccctgtagtgccgtgtagtgccg

SEQ ID NO: 1505 - DNA, 24 bp, Artificial Sequence
  Description of Artificial Sequence: Synthetic oligonucleotide
  5' Phos
tccctgtgaatctgtgtgaatctg

SEQ ID NO: 1506 - DNA, 24 bp, Artificial Sequence
  Description of Artificial Sequence: Synthetic oligonucleotide
  5' Phos
tccctgttccgtggtgttccgtgg

SEQ ID NO: 1507 - DNA, 24 bp, Artificial Sequence
  Description of Artificial Sequence: Synthetic oligonucleotide
  5' Phos
tcccttagcgcgtgttagcgcgtg

SEQ ID NO: 1508 - DNA, 24 bp, Artificial Sequence
  Description of Artificial Sequence: Synthetic oligonucleotide
  5' Phos
tcccttagttggacttagttggac

SEQ ID NO: 1509 - DNA, 24 bp, Artificial Sequence
  Description of Artificial Sequence: Synthetic oligonucleotide
  5' Phos
tcccttccaacttcttccaacttc

SEQ ID NO: 1510 - DNA, 24 bp, Artificial Sequence
  Description of Artificial Sequence: Synthetic oligonucleotide
  5' Phos
tcccttccgtcaggttccgtcagg

SEQ ID NO: 1511 - DNA, 24 bp, Artificial Sequence
  Description of Artificial Sequence: Synthetic oligonucleotide
  5' Phos
tcccttcctcaccgttcctcaccg

SEQ ID NO: 1512 - DNA, 24 bp, Artificial Sequence
  Description of Artificial Sequence: Synthetic oligonucleotide
  5' Phos
tcccttcctccgacttcctccgac

SEQ ID NO: 1513 - DNA, 24 bp, Artificial Sequence
  Description of Artificial Sequence: Synthetic oligonucleotide
  5' Phos
tcccttcgacctggttcgacctgg

SEQ ID NO: 1514 - DNA, 24 bp, Artificial Sequence
  Description of Artificial Sequence: Synthetic oligonucleotide
  5' Phos
tcccttcgcgtggattcgcgtgga

SEQ ID NO: 1515 - DNA, 24 bp, Artificial Sequence
  Description of Artificial Sequence: Synthetic oligonucleotide
  5' Phos
tcccttcggaagcgttcggaagcg

SEQ ID NO: 1516 - DNA, 24 bp, Artificial Sequence
  Description of Artificial Sequence: Synthetic oligonucleotide
  5' Phos
tcccttctcgattgttctcgattg

SEQ ID NO: 1517 - DNA, 24 bp, Artificial Sequence
  Description of Artificial Sequence: Synthetic oligonucleotide
  5' Phos
tcccttctctctagttctctctag

SEQ ID NO: 1518 - DNA, 24 bp, Artificial Sequence
  Description of Artificial Sequence: Synthetic oligonucleotide
  5' Phos
tcccttcttgcgcgttcttgcgcg

SEQ ID NO: 1519 - DNA, 24 bp, Artificial Sequence
  Description of Artificial Sequence: Synthetic oligonucleotide
  5' Phos
tcccttgaggtcggttgaggtcgg

SEQ ID NO: 1520 - DNA, 24 bp, Artificial Sequence
  Description of Artificial Sequence: Synthetic oligonucleotide
  5' Phos
tcccttgcacacgcttgcacacgc

SEQ ID NO: 1521 - DNA, 24 bp, Artificial Sequence
  Description of Artificial Sequence: Synthetic oligonucleotide
  5' Phos
tcccttgcgctctgttgcgctctg

SEQ ID NO: 1522 - DNA, 24 bp, Artificial Sequence
  Description of Artificial Sequence: Synthetic oligonucleotide
  5' Phos
tcccttgctgcagcttgctgcagc

SEQ ID NO: 1523 - DNA, 24 bp, Artificial Sequence
  Description of Artificial Sequence: Synthetic oligonucleotide
  5' Phos
tcccttggcgtctgttggcgtctg

SEQ ID NO: 1524 - DNA, 24 bp, Artificial Sequence
  Description of Artificial Sequence: Synthetic oligonucleotide
  5' Phos
tcccttggtccttcttggtccttc

SEQ ID NO: 1525 - DNA, 24 bp, Artificial Sequence
  Description of Artificial Sequence: Synthetic oligonucleotide
  5' Phos
tcccttgtcgagagttgtcgagag

SEQ ID NO: 1526 - DNA, 24 bp, Artificial Sequence
  Description of Artificial Sequence: Synthetic oligonucleotide
  5' Phos
tcccttgtctgtacttgtctgtac

SEQ ID NO: 1527 - DNA, 24 bp, Artificial Sequence
  Description of Artificial Sequence: Synthetic oligonucleotide
  5' Phos
tcccttgttctctcttgttctctc

SEQ ID NO: 1528 - DNA, 24 bp, Artificial Sequence
  Description of Artificial Sequence: Synthetic oligonucleotide
  5' Phos
tcccaacacacgttaacacacgtt

SEQ ID NO: 1529 - DNA, 24 bp, Artificial Sequence
  Description of Artificial Sequence: Synthetic oligonucleotide
  5' Phos
tcccaacatcgagtaacatcgagt

SEQ ID NO: 1530 - DNA, 24 bp, Artificial Sequence
  Description of Artificial Sequence: Synthetic oligonucleotide
  5' Phos
tcccaaccgaggacaaccgaggac

SEQ ID NO: 1531 - DNA, 24 bp, Artificial Sequence
  Description of Artificial Sequence: Synthetic oligonucleotide
  5' Phos
tcccaacctagtagaacctagtag

SEQ ID NO: 1532 - DNA, 24 bp, Artificial Sequence
  Description of Artificial Sequence: Synthetic oligonucleotide
  5' Phos
tcccaacgcatactaacgcatact

SEQ ID NO: 1533 - DNA, 24 bp, Artificial Sequence
  Description of Artificial Sequence: Synthetic oligonucleotide
  5' Phos
tcccaactaacctcaactaacctc

SEQ ID NO: 1534 - DNA, 24 bp, Artificial Sequence
  Description of Artificial Sequence: Synthetic oligonucleotide
  5' Phos
tcccaactaaggagaactaaggag

SEQ ID NO: 1535 - DNA, 24 bp, Artificial Sequence
  Description of Artificial Sequence: Synthetic oligonucleotide
  5' Phos
tcccaactcgttctaactcgttct

SEQ ID NO: 1536 - DNA, 24 bp, Artificial Sequence
  Description of Artificial Sequence: Synthetic oligonucleotide
  5' Phos
tcccaactgccgctaactgccgct

SEQ ID NO: 1537 - DNA, 24 bp, Artificial Sequence
  Description of Artificial Sequence: Synthetic oligonucleotide
  5' Phos
cgaaacagatatccacagatatcc

SEQ ID NO: 1538 - DNA, 24 bp, Artificial Sequence
  Description of Artificial Sequence: Synthetic oligonucleotide
  5' Phos
cgaatatggcagcctatggcagcc

SEQ ID NO: 1539 - DNA, 24 bp, Artificial Sequence
  Description of Artificial Sequence: Synthetic oligonucleotide
  5' Phos
cgaattgacataccttgacatacc

SEQ ID NO: 1540 - DNA, 24 bp, Artificial Sequence
  Description of Artificial Sequence: Synthetic oligonucleotide
  5' Phos
cgaagtccttcaccgtccttcacc

SEQ ID NO: 1541 - DNA, 24 bp, Artificial Sequence
  Description of Artificial Sequence: Synthetic oligonucleotide
  5' Phos
cgaaatgctggtacatgctggtac

SEQ ID NO: 1542 - DNA, 24 bp, Artificial Sequence
  Description of Artificial Sequence: Synthetic oligonucleotide
  5' Phos
cgaaggatgtatacggatgtatac

SEQ ID NO: 1543 - DNA, 24 bp, Artificial Sequence
  Description of Artificial Sequence: Synthetic oligonucleotide
  5' Phos
cgaatgagcgatactgagcgatac

SEQ ID NO: 1544 - DNA, 24 bp, Artificial Sequence
  Description of Artificial Sequence: Synthetic oligonucleotide
  5' Phos
cgaatccatcggactccatcggac

SEQ ID NO: 1545 - DNA, 24 bp, Artificial Sequence
  Description of Artificial Sequence: Synthetic oligonucleotide
  5' Phos
cgaaaattccacacaattccacac

SEQ ID NO: 1546 - DNA, 24 bp, Artificial Sequence
  Description of Artificial Sequence: Synthetic oligonucleotide
  5' Phos
cgaatctgccacactctgccacac

SEQ ID NO: 1547 - DNA, 24 bp, Artificial Sequence
  Description of Artificial Sequence: Synthetic oligonucleotide
  5' Phos
cgaatcaccgtaactcaccgtaac

SEQ ID NO: 1548 - DNA, 24 bp, Artificial Sequence
  Description of Artificial Sequence: Synthetic oligonucleotide
  5' Phos
cgaaatgtacgaacatgtacgaac

SEQ ID NO: 1549 - DNA, 24 bp, Artificial Sequence
  Description of Artificial Sequence: Synthetic oligonucleotide
  5' Phos
cgaattaccggttattaccggtta

SEQ ID NO: 1550 - DNA, 24 bp, Artificial Sequence
  Description of Artificial Sequence: Synthetic oligonucleotide
  5' Phos
cgaatgactctgtatgactctgta

SEQ ID NO: 1551 - DNA, 24 bp, Artificial Sequence
  Description of Artificial Sequence: Synthetic oligonucleotide
  5' Phos
cgaatatctcggtatatctcggta

SEQ ID NO: 1552 - DNA, 24 bp, Artificial Sequence
  Description of Artificial Sequence: Synthetic oligonucleotide
  5' Phos
cgaagcgatgcgtagcgatgcgta

SEQ ID NO: 1553 - DNA, 24 bp, Artificial Sequence
  Description of Artificial Sequence: Synthetic oligonucleotide
  5' Phos
cgaacaagcgcgtacaagcgcgta

SEQ ID NO: 1554 - DNA, 24 bp, Artificial Sequence
  Description of Artificial Sequence: Synthetic oligonucleotide
  5' Phos
cgaagtgaagtctagtgaagtcta

SEQ ID NO: 1555 - DNA, 24 bp, Artificial Sequence
  Description of Artificial Sequence: Synthetic oligonucleotide
  5' Phos
cgaactaagcgatactaagcgata

SEQ ID NO: 1556 - DNA, 24 bp, Artificial Sequence
  Description of Artificial Sequence: Synthetic oligonucleotide
  5' Phos
cgaacggatcgtgacggatcgtga

SEQ ID NO: 1557 - DNA, 24 bp, Artificial Sequence
  Description of Artificial Sequence: Synthetic oligonucleotide
  5' Phos
cgaagcgaagctgagcgaagctga

SEQ ID NO: 1558 - DNA, 24 bp, Artificial Sequence
  Description of Artificial Sequence: Synthetic oligonucleotide
  5' Phos
cgaagaagtccggagaagtccgga

SEQ ID NO: 1559 - DNA, 24 bp, Artificial Sequence
  Description of Artificial Sequence: Synthetic oligonucleotide
  5' Phos
cgaaccataccggaccataccgga

SEQ ID NO: 1560 - DNA, 24 bp, Artificial Sequence
  Description of Artificial Sequence: Synthetic oligonucleotide
  5' Phos
cgaatcaccacggatcaccacgga

SEQ ID NO: 1561 - DNA, 24 bp, Artificial Sequence
  Description of Artificial Sequence: Synthetic oligonucleotide
  5' Phos
cgaatggatgaggatggatgagga

SEQ ID NO: 1562 - DNA, 24 bp, Artificial Sequence
  Description of Artificial Sequence: Synthetic oligonucleotide
  5' Phos
cgaatccagaaggatccagaagga

SEQ ID NO: 1563 - DNA, 24 bp, Artificial Sequence
  Description of Artificial Sequence: Synthetic oligonucleotide
  5' Phos
cgaagcaacagcgagcaacagcga

SEQ ID NO: 1564 - DNA, 24 bp, Artificial Sequence
  Description of Artificial Sequence: Synthetic oligonucleotide
  5' Phos
cgaacaagctccgacaagctccga

SEQ ID NO: 1565 - DNA, 24 bp, Artificial Sequence
  Description of Artificial Sequence: Synthetic oligonucleotide
  5' Phos
cgaactcatgccgactcatgccga

SEQ ID NO: 1566 - DNA, 24 bp, Artificial Sequence
  Description of Artificial Sequence: Synthetic oligonucleotide
  5' Phos
cgaagttccaccgagttccaccga

SEQ ID NO: 1567 - DNA, 24 bp, Artificial Sequence
  Description of Artificial Sequence: Synthetic oligonucleotide
  5' Phos
cgaattacaaccgattacaaccga

SEQ ID NO: 1568 - DNA, 24 bp, Artificial Sequence
  Description of Artificial Sequence: Synthetic oligonucleotide
  5' Phos
cgaatgccacacgatgccacacga

SEQ ID NO: 1569 - DNA, 24 bp, Artificial Sequence
  Description of Artificial Sequence: Synthetic oligonucleotide
  5' Phos
cgaagcggaacagagcggaacaga

SEQ ID NO: 1570 - DNA, 24 bp, Artificial Sequence
  Description of Artificial Sequence: Synthetic oligonucleotide
  5' Phos
cgaagacgccaagagacgccaaga

SEQ ID NO: 1571 - DNA, 24 bp, Artificial Sequence
  Description of Artificial Sequence: Synthetic oligonucleotide
  5' Phos
cgaagactcaatcagactcaatca

SEQ ID NO: 1572 - DNA, 24 bp, Artificial Sequence
  Description of Artificial Sequence: Synthetic oligonucleotide
  5' Phos
cgaatgccaacgcatgccaacgca

SEQ ID NO: 1573 - DNA, 24 bp, Artificial Sequence
  Description of Artificial Sequence: Synthetic oligonucleotide
  5' Phos
cgaacgcatgtccacgcatgtcca

SEQ ID NO: 1574 - DNA, 24 bp, Artificial Sequence
  Description of Artificial Sequence: Synthetic oligonucleotide
  5' Phos
cgaatggcttgccatggcttgcca

SEQ ID NO: 1575 - DNA, 24 bp, Artificial Sequence
  Description of Artificial Sequence: Synthetic oligonucleotide
  5' Phos
cgaacagttaaccacagttaacca

SEQ ID NO: 1576 - DNA, 24 bp, Artificial Sequence
  Description of Artificial Sequence: Synthetic oligonucleotide
  5' Phos
cgaactcaggtacactcaggtaca

SEQ ID NO: 1577 - DNA, 24 bp, Artificial Sequence
  Description of Artificial Sequence: Synthetic oligonucleotide
  5' Phos
cgaactgtagtacactgtagtaca

SEQ ID NO: 1578 - DNA, 24 bp, Artificial Sequence
  Description of Artificial Sequence: Synthetic oligonucleotide
  5' Phos
cgaagcaaccgacagcaaccgaca

SEQ ID NO: 1579 - DNA, 24 bp, Artificial Sequence
  Description of Artificial Sequence: Synthetic oligonucleotide
  5' Phos
cgaaccgacagacaccgacagaca

SEQ ID NO: 1580 - DNA, 24 bp, Artificial Sequence
  Description of Artificial Sequence: Synthetic oligonucleotide
  5' Phos
cgaagatagtcacagatagtcaca

SEQ ID NO: 1581 - DNA, 24 bp, Artificial Sequence
  Description of Artificial Sequence: Synthetic oligonucleotide
  5' Phos
cgaacgcactcacacgcactcaca

SEQ ID NO: 1582 - DNA, 24 bp, Artificial Sequence
  Description of Artificial Sequence: Synthetic oligonucleotide
  5' Phos
cgaagcgaaccacagcgaaccaca

SEQ ID NO: 1583 - DNA, 24 bp, Artificial Sequence
  Description of Artificial Sequence: Synthetic oligonucleotide
  5' Phos
cgaagtagagaacagtagagaaca

SEQ ID NO: 1584 - DNA, 24 bp, Artificial Sequence
  Description of Artificial Sequence: Synthetic oligonucleotide
  5' Phos
cgaagactggctaagactggctaa

SEQ ID NO: 1585 - DNA, 24 bp, Artificial Sequence
  Description of Artificial Sequence: Synthetic oligonucleotide
  5' Phos
cgaatattcgcgaatattcgcgaa

SEQ ID NO: 1586 - DNA, 24 bp, Artificial Sequence
  Description of Artificial Sequence: Synthetic oligonucleotide
  5' Phos
cgaagtaccgcgaagtaccgcgaa

SEQ ID NO: 1587 - DNA, 24 bp, Artificial Sequence
  Description of Artificial Sequence: Synthetic oligonucleotide
  5' Phos
cgaactgcatagaactgcatagaa

SEQ ID NO: 1588 - DNA, 24 bp, Artificial Sequence
  Description of Artificial Sequence: Synthetic oligonucleotide
  5' Phos
cgaatcggtaagaatcggtaagaa

SEQ ID NO: 1589 - DNA, 24 bp, Artificial Sequence
  Description of Artificial Sequence: Synthetic oligonucleotide
  5' Phos
cgaatccagagcaatccagagcaa

SEQ ID NO: 1590 - DNA, 24 bp, Artificial Sequence
  Description of Artificial Sequence: Synthetic oligonucleotide
  5' Phos
cgaaggtgttacaaggtgttacaa

SEQ ID NO: 1591 - DNA, 24 bp, Artificial Sequence
  Description of Artificial Sequence: Synthetic oligonucleotide
  5' Phos
cgaaggaacttgttggaacttgtt

SEQ ID NO: 1592 - DNA, 24 bp, Artificial Sequence
  Description of Artificial Sequence: Synthetic oligonucleotide
  5' Phos
cgaagcgtgctgttgcgtgctgtt

SEQ ID NO: 1593 - DNA, 24 bp, Artificial Sequence
  Description of Artificial Sequence: Synthetic oligonucleotide
  5' Phos
cgaaaccgcacgttaccgcacgtt

SEQ ID NO: 1594 - DNA, 24 bp, Artificial Sequence
  Description of Artificial Sequence: Synthetic oligonucleotide
  5' Phos
cgaacatcgctcttcatcgctctt

SEQ ID NO: 1595 - DNA, 24 bp, Artificial Sequence
  Description of Artificial Sequence: Synthetic oligonucleotide
  5' Phos
cgaaggaattccttggaattcctt

SEQ ID NO: 1596 - DNA, 24 bp, Artificial Sequence
  Description of Artificial Sequence: Synthetic oligonucleotide
  5' Phos
cgaacgcctcacttcgcctcactt

SEQ ID NO: 1597 - DNA, 24 bp, Artificial Sequence
  Description of Artificial Sequence: Synthetic oligonucleotide
  5' Phos
cgaaatcgcgtattatcgcgtatt

SEQ ID NO: 1598 - DNA, 24 bp, Artificial Sequence
  Description of Artificial Sequence: Synthetic oligonucleotide
  5' Phos
cgaaccaacctattccaacctatt

SEQ ID NO: 1599 - DNA, 24 bp, Artificial Sequence
  Description of Artificial Sequence: Synthetic oligonucleotide
  5' Phos
cgaaagcttcgattagcttcgatt

SEQ ID NO: 1600 - DNA, 24 bp, Artificial Sequence
  Description of Artificial Sequence: Synthetic oligonucleotide
  5' Phos
cgaaatcgtagtgtatcgtagtgt

SEQ ID NO: 1601 - DNA, 24 bp, Artificial Sequence
  Description of Artificial Sequence: Synthetic oligonucleotide
  5' Phos
cgaaggctgagtgtggctgagtgt

SEQ ID NO: 1602 - DNA, 24 bp, Artificial Sequence
  Description of Artificial Sequence: Synthetic oligonucleotide
  5' Phos
cgaaggctcgatgtggctcgatgt

SEQ ID NO: 1603 - DNA, 24 bp, Artificial Sequence
  Description of Artificial Sequence: Synthetic oligonucleotide
  5' Phos
cgaacgcataatgtcgcataatgt

SEQ ID NO: 1604 - DNA, 24 bp, Artificial Sequence
  Description of Artificial Sequence: Synthetic oligonucleotide
  5' Phos
cgaaagttgctggtagttgctggt

SEQ ID NO: 1605 - DNA, 24 bp, Artificial Sequence
  Description of Artificial Sequence: Synthetic oligonucleotide
  5' Phos
cgaacgtgttcggtcgtgttcggt

SEQ ID NO: 1606 - DNA, 24 bp, Artificial Sequence
  Description of Artificial Sequence: Synthetic oligonucleotide
  5' Phos
cgaaaccgttcggtaccgttcggt

SEQ ID NO: 1607 - DNA, 24 bp, Artificial Sequence
  Description of Artificial Sequence: Synthetic oligonucleotide
  5' Phos
cgaaagccactcgtagccactcgt

SEQ ID NO: 1608 - DNA, 24 bp, Artificial Sequence
  Description of Artificial Sequence: Synthetic oligonucleotide
  5' Phos
cgaaccgtaaccgtccgtaaccgt

SEQ ID NO: 1609 - DNA, 24 bp, Artificial Sequence
  Description of Artificial Sequence: Synthetic oligonucleotide
  5' Phos
cgaagcgcttacgtgcgcttacgt

SEQ ID NO: 1610 - DNA, 24 bp, Artificial Sequence
  Description of Artificial Sequence: Synthetic oligonucleotide
  5' Phos
cgaaagcacatagtagcacatagt

SEQ ID NO: 1611 - DNA, 24 bp, Artificial Sequence
  Description of Artificial Sequence: Synthetic oligonucleotide
  5' Phos
cgaaggactccagtggactccagt

SEQ ID NO: 1612 - DNA, 24 bp, Artificial Sequence
  Description of Artificial Sequence: Synthetic oligonucleotide
  5' Phos
cgaagaagtacagtgaagtacagt

SEQ ID NO: 1613 - DNA, 24 bp, Artificial Sequence
  Description of Artificial Sequence: Synthetic oligonucleotide
  5' Phos
cgaagcagacttctgcagacttct

SEQ ID NO: 1614 - DNA, 24 bp, Artificial Sequence
  Description of Artificial Sequence: Synthetic oligonucleotide
  5' Phos
cgaaactcgcgtctactcgcgtct

SEQ ID NO: 1615 - DNA, 24 bp, Artificial Sequence
  Description of Artificial Sequence: Synthetic oligonucleotide
  5' Phos
cgaaagcacagtctagcacagtct

SEQ ID NO: 1616 - DNA, 24 bp, Artificial Sequence
  Description of Artificial Sequence: Synthetic oligonucleotide
  5' Phos
cgaaggcgtactctggcgtactct

SEQ ID NO: 1617 - DNA, 24 bp, Artificial Sequence
  Description of Artificial Sequence: Synthetic oligonucleotide
  5' Phos
cgaacagtcgatctcagtcgatct

SEQ ID NO: 1618 - DNA, 24 bp, Artificial Sequence
  Description of Artificial Sequence: Synthetic oligonucleotide
  5' Phos
cgaaggccgaatctggccgaatct

SEQ ID NO: 1619 - DNA, 24 bp, Artificial Sequence
  Description of Artificial Sequence: Synthetic oligonucleotide
  5' Phos
cgaaagcacttgctagcacttgct

SEQ ID NO: 1620 - DNA, 24 bp, Artificial Sequence
  Description of Artificial Sequence: Synthetic oligonucleotide
  5' Phos
cgaacgcaatggctcgcaatggct

SEQ ID NO: 1621 - DNA, 24 bp, Artificial Sequence
  Description of Artificial Sequence: Synthetic oligonucleotide
  5' Phos
cgaaactgtccgctactgtccgct

SEQ ID NO: 1622 - DNA, 24 bp, Artificial Sequence
  Description of Artificial Sequence: Synthetic oligonucleotide
  5' Phos
cgaacgcttacgctcgcttacgct

SEQ ID NO: 1623 - DNA, 24 bp, Artificial Sequence
  Description of Artificial Sequence: Synthetic oligonucleotide
  5' Phos
cgaagagaatagctgagaatagct

SEQ ID NO: 1624 - DNA, 24 bp, Artificial Sequence
  Description of Artificial Sequence: Synthetic oligonucleotide
  5' Phos
cgaacgtataagctcgtataagct

SEQ ID NO: 1625 - DNA, 24 bp, Artificial Sequence
  Description of Artificial Sequence: Synthetic oligonucleotide
  5' Phos
cgaacatctgtcctcatctgtcct

SEQ ID NO: 1626 - DNA, 24 bp, Artificial Sequence
  Description of Artificial Sequence: Synthetic oligonucleotide
  5' Phos
cgaaatctgatcctatctgatcct

SEQ ID NO: 1627 - DNA, 24 bp, Artificial Sequence
  Description of Artificial Sequence: Synthetic oligonucleotide
  5' Phos
cgaaccttcagcctccttcagcct

SEQ ID NO: 1628 - DNA, 24 bp, Artificial Sequence
  Description of Artificial Sequence: Synthetic oligonucleotide
  5' Phos
cgaacctcgtacctcctcgtacct

SEQ ID NO: 1629 - DNA, 24 bp, Artificial Sequence
  Description of Artificial Sequence: Synthetic oligonucleotide
  5' Phos
cgaagagcctacctgagcctacct

SEQ ID NO: 1630 - DNA, 24 bp, Artificial Sequence
  Description of Artificial Sequence: Synthetic oligonucleotide
  5' Phos
cgaaccgttcacctccgttcacct

SEQ ID NO: 1631 - DNA, 24 bp, Artificial Sequence
  Description of Artificial Sequence: Synthetic oligonucleotide
  5' Phos
cgaaattggcacctattggcacct

SEQ ID NO: 1632 - DNA, 24 bp, Artificial Sequence
  Description of Artificial Sequence: Synthetic oligonucleotide
  5' Phos
cgaacgttgaacctcgttgaacct

SEQ ID NO: 1633 - DNA, 24 bp, Artificial Sequence
  Description of Artificial Sequence: Synthetic oligonucleotide
  5' Phos
cgaagcgagtgactgcgagtgact

SEQ ID NO: 1634 - DNA, 24 bp, Artificial Sequence
  Description of Artificial Sequence: Synthetic oligonucleotide
  5' Phos
cgaacaccacgactcaccacgact

SEQ ID NO: 1635 - DNA, 24 bp, Artificial Sequence
  Description of Artificial Sequence: Synthetic oligonucleotide
  5' Phos
cgaactcctccactctcctccact

SEQ ID NO: 1636 - DNA, 24 bp, Artificial Sequence
  Description of Artificial Sequence: Synthetic oligonucleotide
  5' Phos
cgaagcgctcaactgcgctcaact

SEQ ID NO: 1637 - DNA, 24 bp, Artificial Sequence
  Description of Artificial Sequence: Synthetic oligonucleotide
  5' Phos
cgaaaccatcaactaccatcaact

SEQ ID NO: 1638 - DNA, 24 bp, Artificial Sequence
  Description of Artificial Sequence: Synthetic oligonucleotide
  5' Phos
cgaagctgtgttatgctgtgttat

SEQ ID NO: 1639 - DNA, 24 bp, Artificial Sequence
  Description of Artificial Sequence: Synthetic oligonucleotide
  5' Phos
cgaacggaccttatcggaccttat

SEQ ID NO: 1640 - DNA, 24 bp, Artificial Sequence
  Description of Artificial Sequence: Synthetic oligonucleotide
  5' Phos
cgaactgactgtatctgactgtat

SEQ ID NO: 1641 - DNA, 24 bp, Artificial Sequence
  Description of Artificial Sequence: Synthetic oligonucleotide
  5' Phos
cgaaaggccggtataggccggtat

SEQ ID NO: 1642 - DNA, 24 bp, Artificial Sequence
  Description of Artificial Sequence: Synthetic oligonucleotide
  5' Phos
cgaaatcctgctatatcctgctat

SEQ ID NO: 1643 - DNA, 24 bp, Artificial Sequence
  Description of Artificial Sequence: Synthetic oligonucleotide
  5' Phos
cgaagtaacgctatgtaacgctat

SEQ ID NO: 1644 - DNA, 24 bp, Artificial Sequence
  Description of Artificial Sequence: Synthetic oligonucleotide
  5' Phos
cgaagttggactatgttggactat

SEQ ID NO: 1645 - DNA, 24 bp, Artificial Sequence
  Description of Artificial Sequence: Synthetic oligonucleotide
  5' Phos
cgaaccgccgatatccgccgatat

SEQ ID NO: 1646 - DNA, 24 bp, Artificial Sequence
  Description of Artificial Sequence: Synthetic oligonucleotide
  5' Phos
cgaacatcacggatcatcacggat

SEQ ID NO: 1647 - DNA, 24 bp, Artificial Sequence
  Description of Artificial Sequence: Synthetic oligonucleotide
  5' Phos
cgaaccggtacgatccggtacgat

SEQ ID NO: 1648 - DNA, 24 bp, Artificial Sequence
  Description of Artificial Sequence: Synthetic oligonucleotide
  5' Phos
cgaacagtaacgatcagtaacgat

SEQ ID NO: 1649 - DNA, 24 bp, Artificial Sequence
  Description of Artificial Sequence: Synthetic oligonucleotide
  5' Phos
cgaagcatcttcatgcatcttcat

SEQ ID NO: 1650 - DNA, 24 bp, Artificial Sequence
  Description of Artificial Sequence: Synthetic oligonucleotide
  5' Phos
cgaaaccacgccataccacgccat

SEQ ID NO: 1651 - DNA, 24 bp, Artificial Sequence
  Description of Artificial Sequence: Synthetic oligonucleotide
  5' Phos
cgaacgctcaacatcgctcaacat

SEQ ID NO: 1652 - DNA, 24 bp, Artificial Sequence
  Description of Artificial Sequence: Synthetic oligonucleotide
  5' Phos
cgaagacagctaatgacagctaat

SEQ ID NO: 1653 - DNA, 24 bp, Artificial Sequence
  Description of Artificial Sequence: Synthetic oligonucleotide
  5' Phos
cgaagcacgcgaatgcacgcgaat

SEQ ID NO: 1654 - DNA, 24 bp, Artificial Sequence
  Description of Artificial Sequence: Synthetic oligonucleotide
  5' Phos
cgaaggagcgcaatggagcgcaat

SEQ ID NO: 1655 - DNA, 24 bp, Artificial Sequence
  Description of Artificial Sequence: Synthetic oligonucleotide
  5' Phos
cgaagcaacacaatgcaacacaat

SEQ ID NO: 1656 - DNA, 24 bp, Artificial Sequence
  Description of Artificial Sequence: Synthetic oligonucleotide
  5' Phos
cgaaattcgtcttgattcgtcttg

SEQ ID NO: 1657 - DNA, 24 bp, Artificial Sequence
  Description of Artificial Sequence: Synthetic oligonucleotide
  5' Phos
cgaaacagtgcgtgacagtgcgtg

SEQ ID NO: 1658 - DNA, 24 bp, Artificial Sequence
  Description of Artificial Sequence: Synthetic oligonucleotide
  5' Phos
cgaactactccgtgctactccgtg

SEQ ID NO: 1659 - DNA, 24 bp, Artificial Sequence
  Description of Artificial Sequence: Synthetic oligonucleotide
  5' Phos
cgaacgataccgtgcgataccgtg

SEQ ID NO: 1660 - DNA, 24 bp, Artificial Sequence
  Description of Artificial Sequence: Synthetic oligonucleotide
  5' Phos
cgaaaatccgagtgaatccgagtg

SEQ ID NO: 1661 - DNA, 24 bp, Artificial Sequence
  Description of Artificial Sequence: Synthetic oligonucleotide
  5' Phos
cgaatactcaagtgtactcaagtg

SEQ ID NO: 1662 - DNA, 24 bp, Artificial Sequence
  Description of Artificial Sequence: Synthetic oligonucleotide
  5' Phos
cgaaactgaggctgactgaggctg

SEQ ID NO: 1663 - DNA, 24 bp, Artificial Sequence
  Description of Artificial Sequence: Synthetic oligonucleotide
  5' Phos
cgaacttggagctgcttggagctg

SEQ ID NO: 1664 - DNA, 24 bp, Artificial Sequence
  Description of Artificial Sequence: Synthetic oligonucleotide
  5' Phos
cgaactcctcgatgctcctcgatg

SEQ ID NO: 1665 - DNA, 24 bp, Artificial Sequence
  Description of Artificial Sequence: Synthetic oligonucleotide
  5' Phos
cgaaacggccaatgacggccaatg

SEQ ID NO: 1666 - DNA, 24 bp, Artificial Sequence
  Description of Artificial Sequence: Synthetic oligonucleotide
  5' Phos
cgaaccagttctggccagttctgg

SEQ ID NO: 1667 - DNA, 24 bp, Artificial Sequence
  Description of Artificial Sequence: Synthetic oligonucleotide
  5' Phos
cgaaccgtatctggccgtatctgg

SEQ ID NO: 1668 - DNA, 24 bp, Artificial Sequence
  Description of Artificial Sequence: Synthetic oligonucleotide
  5' Phos
cgaatggatcctggtggatcctgg

SEQ ID NO: 1669 - DNA, 24 bp, Artificial Sequence
  Description of Artificial Sequence: Synthetic oligonucleotide
  5' Phos
cgaaaacatcctggaacatcctgg

SEQ ID NO: 1670 - DNA, 24 bp, Artificial Sequence
  Description of Artificial Sequence: Synthetic oligonucleotide
  5' Phos
cgaaacatgctcggacatgctcgg

SEQ ID NO: 1671 - DNA, 24 bp, Artificial Sequence
  Description of Artificial Sequence: Synthetic oligonucleotide
  5' Phos
cgaaaacactccggaacactccgg

SEQ ID NO: 1672 - DNA, 24 bp, Artificial Sequence
  Description of Artificial Sequence: Synthetic oligonucleotide
  5' Phos
cgaaatggtaccggatggtaccgg

SEQ ID NO: 1673 - DNA, 24 bp, Artificial Sequence
  Description of Artificial Sequence: Synthetic oligonucleotide
  5' Phos
cgaaccttagacggccttagacgg

SEQ ID NO: 1674 - DNA, 24 bp, Artificial Sequence
  Description of Artificial Sequence: Synthetic oligonucleotide
  5' Phos
cgaattaatggaggttaatggagg

SEQ ID NO: 1675 - DNA, 24 bp, Artificial Sequence
  Description of Artificial Sequence: Synthetic oligonucleotide
  5' Phos
cgaaagtcaggaggagtcaggagg

SEQ ID NO: 1676 - DNA, 24 bp, Artificial Sequence
  Description of Artificial Sequence: Synthetic oligonucleotide
  5' Phos
cgaaagagcagaggagagcagagg

SEQ ID NO: 1677 - DNA, 24 bp, Artificial Sequence
  Description of Artificial Sequence: Synthetic oligonucleotide
  5' Phos
cgaaacaaggcaggacaaggcagg

SEQ ID NO: 1678 - DNA, 24 bp, Artificial Sequence
  Description of Artificial Sequence: Synthetic oligonucleotide
  5' Phos
cgaaaatggccaggaatggccagg

SEQ ID NO: 1679 - DNA, 24 bp, Artificial Sequence
  Description of Artificial Sequence: Synthetic oligonucleotide
  5' Phos
cgaacgcgttaaggcgcgttaagg

SEQ ID NO: 1680 - DNA, 24 bp, Artificial Sequence
  Description of Artificial Sequence: Synthetic oligonucleotide
  5' Phos
cgaaagacaggtcgagacaggtcg

SEQ ID NO: 1681 - DNA, 24 bp, Artificial Sequence
  Description of Artificial Sequence: Synthetic oligonucleotide
  5' Phos
cgaaacgtaacgcgacgtaacgcg

SEQ ID NO: 1682 - DNA, 24 bp, Artificial Sequence
  Description of Artificial Sequence: Synthetic oligonucleotide
  5' Phos
cgaatgaactgccgtgaactgccg

SEQ ID NO: 1683 - DNA, 24 bp, Artificial Sequence
  Description of Artificial Sequence: Synthetic oligonucleotide
  5' Phos
cgaactaatggccgctaatggccg

SEQ ID NO: 1684 - DNA, 24 bp, Artificial Sequence
  Description of Artificial Sequence: Synthetic oligonucleotide
  5' Phos
cgaaatgcaatacgatgcaatacg

SEQ ID NO: 1685 - DNA, 24 bp, Artificial Sequence
  Description of Artificial Sequence: Synthetic oligonucleotide
  5' Phos
cgaaacggtcgtagacggtcgtag

SEQ ID NO: 1686 - DNA, 24 bp, Artificial Sequence
  Description of Artificial Sequence: Synthetic oligonucleotide
  5' Phos
cgaaaccttcctagaccttcctag

SEQ ID NO: 1687 - DNA, 24 bp, Artificial Sequence
  Description of Artificial Sequence: Synthetic oligonucleotide
  5' Phos
cgaaacaggactagacaggactag

SEQ ID NO: 1688 - DNA, 24 bp, Artificial Sequence
  Description of Artificial Sequence: Synthetic oligonucleotide
  5' Phos
cgaacctccactagcctccactag

SEQ ID NO: 1689 - DNA, 24 bp, Artificial Sequence
  Description of Artificial Sequence: Synthetic oligonucleotide
  5' Phos
cgaaactctgcgagactctgcgag

SEQ ID NO: 1690 - DNA, 24 bp, Artificial Sequence
  Description of Artificial Sequence: Synthetic oligonucleotide
  5' Phos
cgaaacgaagcgagacgaagcgag

SEQ ID NO: 1691 - DNA, 24 bp, Artificial Sequence
  Description of Artificial Sequence: Synthetic oligonucleotide
  5' Phos
cgaacgctaacgagcgctaacgag

SEQ ID NO: 1692 - DNA, 24 bp, Artificial Sequence
  Description of Artificial Sequence: Synthetic oligonucleotide
  5' Phos
cgaacttggaagagcttggaagag

SEQ ID NO: 1693 - DNA, 24 bp, Artificial Sequence
  Description of Artificial Sequence: Synthetic oligonucleotide
  5' Phos
cgaaattgaagcagattgaagcag

SEQ ID NO: 1694 - DNA, 24 bp, Artificial Sequence
  Description of Artificial Sequence: Synthetic oligonucleotide
  5' Phos
cgaattgataccagttgataccag

SEQ ID NO: 1695 - DNA, 24 bp, Artificial Sequence
  Description of Artificial Sequence: Synthetic oligonucleotide
  5' Phos
cgaaccgaagacagccgaagacag

SEQ ID NO: 1696 - DNA, 24 bp, Artificial Sequence
  Description of Artificial Sequence: Synthetic oligonucleotide
  5' Phos
cgaacgtcatgaagcgtcatgaag

SEQ ID NO: 1697 - DNA, 24 bp, Artificial Sequence
  Description of Artificial Sequence: Synthetic oligonucleotide
  5' Phos
cgaaactgccgaagactgccgaag

SEQ ID NO: 1698 - DNA, 24 bp, Artificial Sequence
  Description of Artificial Sequence: Synthetic oligonucleotide
  5' Phos
cgaaaccggtcaagaccggtcaag

SEQ ID NO: 1699 - DNA, 24 bp, Artificial Sequence
  Description of Artificial Sequence: Synthetic oligonucleotide
  5' Phos
cgaaaataggcaagaataggcaag

SEQ ID NO: 1700 - DNA, 24 bp, Artificial Sequence
  Description of Artificial Sequence: Synthetic oligonucleotide
  5' Phos
cgaatcacaagttctcacaagttc

SEQ ID NO: 1701 - DNA, 24 bp, Artificial Sequence
  Description of Artificial Sequence: Synthetic oligonucleotide
  5' Phos
cgaaagaatgcttcagaatgcttc

SEQ ID NO: 1702 - DNA, 24 bp, Artificial Sequence
  Description of Artificial Sequence: Synthetic oligonucleotide
  5' Phos
cgaagaatggattcgaatggattc

SEQ ID NO: 1703 - DNA, 24 bp, Artificial Sequence
  Description of Artificial Sequence: Synthetic oligonucleotide
  5' Phos
cgaaaacaggcgtcaacaggcgtc

SEQ ID NO: 1704 - DNA, 24 bp, Artificial Sequence
  Description of Artificial Sequence: Synthetic oligonucleotide
  5' Phos
cgaagtcctacgtcgtcctacgtc

SEQ ID NO: 1705 - DNA, 24 bp, Artificial Sequence
  Description of Artificial Sequence: Synthetic oligonucleotide
  5' Phos
cgaaaccattagtcaccattagtc

SEQ ID NO: 1706 - DNA, 24 bp, Artificial Sequence
  Description of Artificial Sequence: Synthetic oligonucleotide
  5' Phos
cgaaaaggaggctcaaggaggctc

SEQ ID NO: 1707 - DNA, 24 bp, Artificial Sequence
  Description of Artificial Sequence: Synthetic oligonucleotide
  5' Phos
cgaagtagacgctcgtagacgctc

SEQ ID NO: 1708 - DNA, 24 bp, Artificial Sequence
  Description of Artificial Sequence: Synthetic oligonucleotide
  5' Phos
cgaagcctatcctcgcctatcctc

SEQ ID NO: 1709 - DNA, 24 bp, Artificial Sequence
  Description of Artificial Sequence: Synthetic oligonucleotide
  5' Phos
cgaagatggcactcgatggcactc

SEQ ID NO: 1710 - DNA, 24 bp, Artificial Sequence
  Description of Artificial Sequence: Synthetic oligonucleotide
  5' Phos
cgaaagatccactcagatccactc

SEQ ID NO: 1711 - DNA, 24 bp, Artificial Sequence
  Description of Artificial Sequence: Synthetic oligonucleotide
  5' Phos
cgaagctaccactcgctaccactc

SEQ ID NO: 1712 - DNA, 24 bp, Artificial Sequence
  Description of Artificial Sequence: Synthetic oligonucleotide
  5' Phos
cgaatctctaactctctctaactc

SEQ ID NO: 1713 - DNA, 24 bp, Artificial Sequence
  Description of Artificial Sequence: Synthetic oligonucleotide
  5' Phos
cgaagcagatgtgcgcagatgtgc

SEQ ID NO: 1714 - DNA, 24 bp, Artificial Sequence
  Description of Artificial Sequence: Synthetic oligonucleotide
  5' Phos
cgaagtaatggtgcgtaatggtgc

SEQ ID NO: 1715 - DNA, 24 bp, Artificial Sequence
  Description of Artificial Sequence: Synthetic oligonucleotide
  5' Phos
cgaaaataggctgcaataggctgc

SEQ ID NO: 1716 - DNA, 24 bp, Artificial Sequence
  Description of Artificial Sequence: Synthetic oligonucleotide
  5' Phos
cgaattgatactgcttgatactgc

SEQ ID NO: 1717 - DNA, 24 bp, Artificial Sequence
  Description of Artificial Sequence: Synthetic oligonucleotide
  5' Phos
cgaataacgacggctaacgacggc

SEQ ID NO: 1718 - DNA, 24 bp, Artificial Sequence
  Description of Artificial Sequence: Synthetic oligonucleotide
  5' Phos
cgaatagctcaggctagctcaggc

SEQ ID NO: 1719 - DNA, 24 bp, Artificial Sequence
  Description of Artificial Sequence: Synthetic oligonucleotide
  5' Phos
cgaattgcttgcgcttgcttgcgc

SEQ ID NO: 1720 - DNA, 24 bp, Artificial Sequence
  Description of Artificial Sequence: Synthetic oligonucleotide
  5' Phos
cgaagtcgtaacgcgtcgtaacgc

SEQ ID NO: 1721 - DNA, 24 bp, Artificial Sequence
  Description of Artificial Sequence: Synthetic oligonucleotide
  5' Phos
cgaagatccaacgcgatccaacgc

SEQ ID NO: 1722 - DNA, 24 bp, Artificial Sequence
  Description of Artificial Sequence: Synthetic oligonucleotide
  5' Phos
cgaatgcgactagctgcgactagc

SEQ ID NO: 1723 - DNA, 24 bp, Artificial Sequence
  Description of Artificial Sequence: Synthetic oligonucleotide
  5' Phos
cgaaggtagtgagcggtagtgagc

SEQ ID NO: 1724 - DNA, 24 bp, Artificial Sequence
  Description of Artificial Sequence: Synthetic oligonucleotide
  5' Phos
cgaataattcgagctaattcgagc

SEQ ID NO: 1725 - DNA, 24 bp, Artificial Sequence
  Description of Artificial Sequence: Synthetic oligonucleotide
  5' Phos
cgaaggaatcgagcggaatcgagc

SEQ ID NO: 1726 - DNA, 24 bp, Artificial Sequence
  Description of Artificial Sequence: Synthetic oligonucleotide
  5' Phos
cgaagatcctcagcgatcctcagc

SEQ ID NO: 1727 - DNA, 24 bp, Artificial Sequence
  Description of Artificial Sequence: Synthetic oligonucleotide
  5' Phos
cgaaagaatgaagcagaatgaagc

SEQ ID NO: 1728 - DNA, 24 bp, Artificial Sequence
  Description of Artificial Sequence: Synthetic oligonucleotide
  5' Phos
cgaaaatagcaagcaatagcaagc

SEQ ID NO: 1729 - DNA, 24 bp, Artificial Sequence
  Description of Artificial Sequence: Synthetic oligonucleotide
  5' Phos
gtcagcaaccaagcgcaaccaagc

SEQ ID NO: 1730 - DNA, 24 bp, Artificial Sequence
  Description of Artificial Sequence: Synthetic oligonucleotide
  5' Phos
gtcagaaccactccgaaccactcc

SEQ ID NO: 1731 - DNA, 24 bp, Artificial Sequence
  Description of Artificial Sequence: Synthetic oligonucleotide
  5' Phos
gtcaggtattatccggtattatcc

SEQ ID NO: 1732 - DNA, 24 bp, Artificial Sequence
  Description of Artificial Sequence: Synthetic oligonucleotide
  5' Phos
gtcaaccacgatccaccacgatcc

SEQ ID NO: 1733 - DNA, 24 bp, Artificial Sequence
  Description of Artificial Sequence: Synthetic oligonucleotide
  5' Phos
gtcaacaatcatccacaatcatcc

SEQ ID NO: 1734 - DNA, 24 bp, Artificial Sequence
  Description of Artificial Sequence: Synthetic oligonucleotide
  5' Phos
gtcagaacgcatccgaacgcatcc

SEQ ID NO: 1735 - DNA, 24 bp, Artificial Sequence
  Description of Artificial Sequence: Synthetic oligonucleotide
  5' Phos
gtcagacattcgccgacattcgcc

SEQ ID NO: 1736 - DNA, 24 bp, Artificial Sequence
  Description of Artificial Sequence: Synthetic oligonucleotide
  5' Phos
gtcaaccaatcgccaccaatcgcc

SEQ ID NO: 1737 - DNA, 24 bp, Artificial Sequence
  Description of Artificial Sequence: Synthetic oligonucleotide
  5' Phos
gtcatgataccgcctgataccgcc

SEQ ID NO: 1738 - DNA, 24 bp, Artificial Sequence
  Description of Artificial Sequence: Synthetic oligonucleotide
  5' Phos
gtcagtggatagccgtggatagcc

SEQ ID NO: 1739 - DNA, 24 bp, Artificial Sequence
  Description of Artificial Sequence: Synthetic oligonucleotide
  5' Phos
gtcatgtaatagcctgtaatagcc

SEQ ID NO: 1740 - DNA, 24 bp, Artificial Sequence
  Description of Artificial Sequence: Synthetic oligonucleotide
  5' Phos
gtcagagttcagccgagttcagcc

SEQ ID NO: 1741 - DNA, 24 bp, Artificial Sequence
  Description of Artificial Sequence: Synthetic oligonucleotide
  5' Phos
gtcatgactgtacctgactgtacc

SEQ ID NO: 1742 - DNA, 24 bp, Artificial Sequence
  Description of Artificial Sequence: Synthetic oligonucleotide
  5' Phos
gtcaaggttcgaccaggttcgacc

SEQ ID NO: 1743 - DNA, 24 bp, Artificial Sequence
  Description of Artificial Sequence: Synthetic oligonucleotide
  5' Phos
gtcaacgagagaccacgagagacc

SEQ ID NO: 1744 - DNA, 24 bp, Artificial Sequence
  Description of Artificial Sequence: Synthetic oligonucleotide
  5' Phos
gtcagacaagcaccgacaagcacc

SEQ ID NO: 1745 - DNA, 24 bp, Artificial Sequence
  Description of Artificial Sequence: Synthetic oligonucleotide
  5' Phos
gtcaaagtggaaccaagtggaacc

SEQ ID NO: 1746 - DNA, 24 bp, Artificial Sequence
  Description of Artificial Sequence: Synthetic oligonucleotide
  5' Phos
gtcaggatgcaaccggatgcaacc

SEQ ID NO: 1747 - DNA, 24 bp, Artificial Sequence
  Description of Artificial Sequence: Synthetic oligonucleotide
  5' Phos
gtcaacgtccaaccacgtccaacc

SEQ ID NO: 1748 - DNA, 24 bp, Artificial Sequence
  Description of Artificial Sequence: Synthetic oligonucleotide
  5' Phos
gtcattgctcttacttgctcttac

SEQ ID NO: 1749 - DNA, 24 bp, Artificial Sequence
  Description of Artificial Sequence: Synthetic oligonucleotide
  5' Phos
gtcataagccttactaagccttac

SEQ ID NO: 1750 - DNA, 24 bp, Artificial Sequence
  Description of Artificial Sequence: Synthetic oligonucleotide
  5' Phos
gtcatgaggactactgaggactac

SEQ ID NO: 1751 - DNA, 24 bp, Artificial Sequence
  Description of Artificial Sequence: Synthetic oligonucleotide
  5' Phos
gtcaagaaccggacagaaccggac

SEQ ID NO: 1752 - DNA, 24 bp, Artificial Sequence
  Description of Artificial Sequence: Synthetic oligonucleotide
  5' Phos
gtcagctgtaggacgctgtaggac

SEQ ID NO: 1753 - DNA, 24 bp, Artificial Sequence
  Description of Artificial Sequence: Synthetic oligonucleotide
  5' Phos
gtcattaatccgacttaatccgac

SEQ ID NO: 1754 - DNA, 24 bp, Artificial Sequence
  Description of Artificial Sequence: Synthetic oligonucleotide
  5' Phos
gtcattctgttcacttctgttcac

SEQ ID NO: 1755 - DNA, 24 bp, Artificial Sequence
  Description of Artificial Sequence: Synthetic oligonucleotide
  5' Phos
gtcagtgtaggcacgtgtaggcac

SEQ ID NO: 1756 - DNA, 24 bp, Artificial Sequence
  Description of Artificial Sequence: Synthetic oligonucleotide
  5' Phos
gtcatccgatacactccgatacac

SEQ ID NO: 1757 - DNA, 24 bp, Artificial Sequence
  Description of Artificial Sequence: Synthetic oligonucleotide
  5' Phos
gtcatcatggacactcatggacac

SEQ ID NO: 1758 - DNA, 24 bp, Artificial Sequence
  Description of Artificial Sequence: Synthetic oligonucleotide
  5' Phos
gtcagattagacacgattagacac

SEQ ID NO: 1759 - DNA, 24 bp, Artificial Sequence
  Description of Artificial Sequence: Synthetic oligonucleotide
  5' Phos
gtcagcaggaacacgcaggaacac

SEQ ID NO: 1760 - DNA, 24 bp, Artificial Sequence
  Description of Artificial Sequence: Synthetic oligonucleotide
  5' Phos
gtcaagcagaacacagcagaacac

SEQ ID NO: 1761 - DNA, 24 bp, Artificial Sequence
  Description of Artificial Sequence: Synthetic oligonucleotide
  5' Phos
gtcatcctcttaactcctcttaac

SEQ ID NO: 1762 - DNA, 24 bp, Artificial Sequence
  Description of Artificial Sequence: Synthetic oligonucleotide
  5' Phos
gtcaacgcattaacacgcattaac

SEQ ID NO: 1763 - DNA, 24 bp, Artificial Sequence
  Description of Artificial Sequence: Synthetic oligonucleotide
  5' Phos
gtcaacagcctaacacagcctaac

SEQ ID NO: 1764 - DNA, 24 bp, Artificial Sequence
  Description of Artificial Sequence: Synthetic oligonucleotide
  5' Phos
gtcatccaatgaactccaatgaac

SEQ ID NO: 1765 - DNA, 24 bp, Artificial Sequence
  Description of Artificial Sequence: Synthetic oligonucleotide
  5' Phos
gtcatggtccgaactggtccgaac

SEQ ID NO: 1766 - DNA, 24 bp, Artificial Sequence
  Description of Artificial Sequence: Synthetic oligonucleotide
  5' Phos
gtcaactggccaacactggccaac

SEQ ID NO: 1767 - DNA, 24 bp, Artificial Sequence
  Description of Artificial Sequence: Synthetic oligonucleotide
  5' Phos
gtcaaactaccaacaactaccaac

SEQ ID NO: 1768 - DNA, 24 bp, Artificial Sequence
  Description of Artificial Sequence: Synthetic oligonucleotide
  5' Phos
gtcatgtcgtgttatgtcgtgtta

SEQ ID NO: 1769 - DNA, 24 bp, Artificial Sequence
  Description of Artificial Sequence: Synthetic oligonucleotide
  5' Phos
gtcatgctctcttatgctctctta

SEQ ID NO: 1770 - DNA, 24 bp, Artificial Sequence
  Description of Artificial Sequence: Synthetic oligonucleotide
  5' Phos
gtcaccgcctcttaccgcctctta

SEQ ID NO: 1771 - DNA, 24 bp, Artificial Sequence
  Description of Artificial Sequence: Synthetic oligonucleotide
  5' Phos
gtcaccattccttaccattcctta

SEQ ID NO: 1772 - DNA, 24 bp, Artificial Sequence
  Description of Artificial Sequence: Synthetic oligonucleotide
  5' Phos
gtcagtgctcattagtgctcatta

SEQ ID NO: 1773 - DNA, 24 bp, Artificial Sequence
  Description of Artificial Sequence: Synthetic oligonucleotide
  5' Phos
gtcagaccagtgtagaccagtgta

SEQ ID NO: 1774 - DNA, 24 bp, Artificial Sequence
  Description of Artificial Sequence: Synthetic oligonucleotide
  5' Phos
gtcattgcgctgtattgcgctgta

SEQ ID NO: 1775 - DNA, 24 bp, Artificial Sequence
  Description of Artificial Sequence: Synthetic oligonucleotide
  5' Phos
gtcactaacctgtactaacctgta

SEQ ID NO: 1776 - DNA, 24 bp, Artificial Sequence
  Description of Artificial Sequence: Synthetic oligonucleotide
  5' Phos
gtcacggtaatgtacggtaatgta

SEQ ID NO: 1777 - DNA, 24 bp, Artificial Sequence
  Description of Artificial Sequence: Synthetic oligonucleotide
  5' Phos
gtcagagattggtagagattggta

SEQ ID NO: 1778 - DNA, 24 bp, Artificial Sequence
  Description of Artificial Sequence: Synthetic oligonucleotide
  5' Phos
gtcactctccggtactctccggta

SEQ ID NO: 1779 - DNA, 24 bp, Artificial Sequence
  Description of Artificial Sequence: Synthetic oligonucleotide
  5' Phos
gtcagaagccggtagaagccggta

SEQ ID NO: 1780 - DNA, 24 bp, Artificial Sequence
  Description of Artificial Sequence: Synthetic oligonucleotide
  5' Phos
gtcacatgtaggtacatgtaggta

SEQ ID NO: 1781 - DNA, 24 bp, Artificial Sequence
  Description of Artificial Sequence: Synthetic oligonucleotide
  5' Phos
gtcacgtaatcgtacgtaatcgta

SEQ ID NO: 1782 - DNA, 24 bp, Artificial Sequence
  Description of Artificial Sequence: Synthetic oligonucleotide
  5' Phos
gtcacctctgcgtacctctgcgta

SEQ ID NO: 1783 - DNA, 24 bp, Artificial Sequence
  Description of Artificial Sequence: Synthetic oligonucleotide
  5' Phos
gtcatcgttgagtatcgttgagta

SEQ ID NO: 1784 - DNA, 24 bp, Artificial Sequence
  Description of Artificial Sequence: Synthetic oligonucleotide
  5' Phos
gtcaggttggtctaggttggtcta

SEQ ID NO: 1785 - DNA, 24 bp, Artificial Sequence
  Description of Artificial Sequence: Synthetic oligonucleotide
  5' Phos
gtcacggaggtctacggaggtcta

SEQ ID NO: 1786 - DNA, 24 bp, Artificial Sequence
  Description of Artificial Sequence: Synthetic oligonucleotide
  5' Phos
gtcatcaactgctatcaactgcta

SEQ ID NO: 1787 - DNA, 24 bp, Artificial Sequence
  Description of Artificial Sequence: Synthetic oligonucleotide
  5' Phos
gtcagcttgcgctagcttgcgcta

SEQ ID NO: 1788 - DNA, 24 bp, Artificial Sequence
  Description of Artificial Sequence: Synthetic oligonucleotide
  5' Phos
gtcaggtatagctaggtatagcta

SEQ ID NO: 1789 - DNA, 24 bp, Artificial Sequence
  Description of Artificial Sequence: Synthetic oligonucleotide
  5' Phos
gtcagcgcaagctagcgcaagcta

SEQ ID NO: 1790 - DNA, 24 bp, Artificial Sequence
  Description of Artificial Sequence: Synthetic oligonucleotide
  5' Phos
gtcatggattcctatggattccta

SEQ ID NO: 1791 - DNA, 24 bp, Artificial Sequence
  Description of Artificial Sequence: Synthetic oligonucleotide
  5' Phos
gtcagaacggcctagaacggccta

SEQ ID NO: 1792 - DNA, 24 bp, Artificial Sequence
  Description of Artificial Sequence: Synthetic oligonucleotide
  5' Phos
gtcatagtgacctatagtgaccta

SEQ ID NO: 1793 - DNA, 24 bp, Artificial Sequence
  Description of Artificial Sequence: Synthetic oligonucleotide
  5' Phos
gtcagacgcgactagacgcgacta

SEQ ID NO: 1794 - DNA, 24 bp, Artificial Sequence
  Description of Artificial Sequence: Synthetic oligonucleotide
  5' Phos
gtcatagccgtatatagccgtata

SEQ ID NO: 1795 - DNA, 24 bp, Artificial Sequence
  Description of Artificial Sequence: Synthetic oligonucleotide
  5' Phos
gtcatgccgcgatatgccgcgata

SEQ ID NO: 1796 - DNA, 24 bp, Artificial Sequence
  Description of Artificial Sequence: Synthetic oligonucleotide
  5' Phos
gtcattgctccatattgctccata

SEQ ID NO: 1797 - DNA, 24 bp, Artificial Sequence
  Description of Artificial Sequence: Synthetic oligonucleotide
  5' Phos
gtcaccacgccataccacgccata

SEQ ID NO: 1798 - DNA, 24 bp, Artificial Sequence
  Description of Artificial Sequence: Synthetic oligonucleotide
  5' Phos
gtcacctgaacatacctgaacata

SEQ ID NO: 1799 - DNA, 24 bp, Artificial Sequence
  Description of Artificial Sequence: Synthetic oligonucleotide
  5' Phos
gtcagacaggaatagacaggaata

SEQ ID NO: 1800 - DNA, 24 bp, Artificial Sequence
  Description of Artificial Sequence: Synthetic oligonucleotide
  5' Phos
gtcagatctcttgagatctcttga

SEQ ID NO: 1801 - DNA, 24 bp, Artificial Sequence
  Description of Artificial Sequence: Synthetic oligonucleotide
  5' Phos
gtcattggtagtgattggtagtga

SEQ ID NO: 1802 - DNA, 24 bp, Artificial Sequence
  Description of Artificial Sequence: Synthetic oligonucleotide
  5' Phos
gtcacgcagactgacgcagactga

SEQ ID NO: 1803 - DNA, 24 bp, Artificial Sequence
  Description of Artificial Sequence: Synthetic oligonucleotide
  5' Phos
gtcagcttaactgagcttaactga

SEQ ID NO: 1804 - DNA, 24 bp, Artificial Sequence
  Description of Artificial Sequence: Synthetic oligonucleotide
  5' Phos
gtcaccactctggaccactctgga

SEQ ID NO: 1805 - DNA, 24 bp, Artificial Sequence
  Description of Artificial Sequence: Synthetic oligonucleotide
  5' Phos
gtcagacgactggagacgactgga

SEQ ID NO: 1806 - DNA, 24 bp, Artificial Sequence
  Description of Artificial Sequence: Synthetic oligonucleotide
  5' Phos
gtcacaacgtcggacaacgtcgga

SEQ ID NO: 1807 - DNA, 24 bp, Artificial Sequence
  Description of Artificial Sequence: Synthetic oligonucleotide
  5' Phos
gtcagtcggtaggagtcggtagga

SEQ ID NO: 1808 - DNA, 24 bp, Artificial Sequence
  Description of Artificial Sequence: Synthetic oligonucleotide
  5' Phos
gtcaggaggaaggaggaggaagga

SEQ ID NO: 1809 - DNA, 24 bp, Artificial Sequence
  Description of Artificial Sequence: Synthetic oligonucleotide
  5' Phos
gtcatggctctcgatggctctcga

SEQ ID NO: 1810 - DNA, 24 bp, Artificial Sequence
  Description of Artificial Sequence: Synthetic oligonucleotide
  5' Phos
gtcagtctgtgcgagtctgtgcga

SEQ ID NO: 1811 - DNA, 24 bp, Artificial Sequence
  Description of Artificial Sequence: Synthetic oligonucleotide
  5' Phos
gtcactaacggcgactaacggcga

SEQ ID NO: 1812 - DNA, 24 bp, Artificial Sequence
  Description of Artificial Sequence: Synthetic oligonucleotide
  5' Phos
gtcagttgtgccgagttgtgccga

SEQ ID NO: 1813 - DNA, 24 bp, Artificial Sequence
  Description of Artificial Sequence: Synthetic oligonucleotide
  5' Phos
gtcacaactgccgacaactgccga

SEQ ID NO: 1814 - DNA, 24 bp, Artificial Sequence
  Description of Artificial Sequence: Synthetic oligonucleotide
  5' Phos
gtcagtgtgaccgagtgtgaccga

SEQ ID NO: 1815 - DNA, 24 bp, Artificial Sequence
  Description of Artificial Sequence: Synthetic oligonucleotide
  5' Phos
gtcagctagcacgagctagcacga

SEQ ID NO: 1816 - DNA, 24 bp, Artificial Sequence
  Description of Artificial Sequence: Synthetic oligonucleotide
  5' Phos
gtcattaggctagattaggctaga

SEQ ID NO: 1817 - DNA, 24 bp, Artificial Sequence
  Description of Artificial Sequence: Synthetic oligonucleotide
  5' Phos
gtcacgcagtgagacgcagtgaga

SEQ ID NO: 1818 - DNA, 24 bp, Artificial Sequence
  Description of Artificial Sequence: Synthetic oligonucleotide
  5' Phos
gtcattgccggagattgccggaga

SEQ ID NO: 1819 - DNA, 24 bp, Artificial Sequence
  Description of Artificial Sequence: Synthetic oligonucleotide
  5' Phos
gtcagagagcgagagagagcgaga

SEQ ID NO: 1820 - DNA, 24 bp, Artificial Sequence
  Description of Artificial Sequence: Synthetic oligonucleotide
  5' Phos
gtcattgcgacagattgcgacaga

SEQ ID NO: 1821 - DNA, 24 bp, Artificial Sequence
  Description of Artificial Sequence: Synthetic oligonucleotide
  5' Phos
gtcagaggttaagagaggttaaga

SEQ ID NO: 1822 - DNA, 24 bp, Artificial Sequence
  Description of Artificial Sequence: Synthetic oligonucleotide
  5' Phos
gtcatcatgtgtcatcatgtgtca

SEQ ID NO: 1823 - DNA, 24 bp, Artificial Sequence
  Description of Artificial Sequence: Synthetic oligonucleotide
  5' Phos
gtcattcactctcattcactctca

SEQ ID NO: 1824 - DNA, 24 bp, Artificial Sequence
  Description of Artificial Sequence: Synthetic oligonucleotide
  5' Phos
gtcacagccactcacagccactca

SEQ ID NO: 1825 - DNA, 24 bp, Artificial Sequence
  Description of Artificial Sequence: Synthetic oligonucleotide
  5' Phos
gtcatggtcaatcatggtcaatca

SEQ ID NO: 1826 - DNA, 24 bp, Artificial Sequence
  Description of Artificial Sequence: Synthetic oligonucleotide
  5' Phos
gtcatgcgactgcatgcgactgca

SEQ ID NO: 1827 - DNA, 24 bp, Artificial Sequence
  Description of Artificial Sequence: Synthetic oligonucleotide
  5' Phos
gtcacctcatggcacctcatggca

SEQ ID NO: 1828 - DNA, 24 bp, Artificial Sequence
  Description of Artificial Sequence: Synthetic oligonucleotide
  5' Phos
gtcagcgttaggcagcgttaggca

SEQ ID NO: 1829 - DNA, 24 bp, Artificial Sequence
  Description of Artificial Sequence: Synthetic oligonucleotide
  5' Phos
gtcagttataggcagttataggca

SEQ ID NO: 1830 - DNA, 24 bp, Artificial Sequence
  Description of Artificial Sequence: Synthetic oligonucleotide
  5' Phos
gtcactctctcgcactctctcgca

SEQ ID NO: 1831 - DNA, 24 bp, Artificial Sequence
  Description of Artificial Sequence: Synthetic oligonucleotide
  5' Phos
gtcatgatcgcgcatgatcgcgca

SEQ ID NO: 1832 - DNA, 24 bp, Artificial Sequence
  Description of Artificial Sequence: Synthetic oligonucleotide
  5' Phos
gtcatcactccgcatcactccgca

SEQ ID NO: 1833 - DNA, 24 bp, Artificial Sequence
  Description of Artificial Sequence: Synthetic oligonucleotide
  5' Phos
gtcaggaatccgcaggaatccgca

SEQ ID NO: 1834 - DNA, 24 bp, Artificial Sequence
  Description of Artificial Sequence: Synthetic oligonucleotide
  5' Phos
gtcatgtagccgcatgtagccgca

SEQ ID NO: 1835 - DNA, 24 bp, Artificial Sequence
  Description of Artificial Sequence: Synthetic oligonucleotide
  5' Phos
gtcattgttacgcattgttacgca

SEQ ID NO: 1836 - DNA, 24 bp, Artificial Sequence
  Description of Artificial Sequence: Synthetic oligonucleotide
  5' Phos
gtcatgaggacgcatgaggacgca

SEQ ID NO: 1837 - DNA, 24 bp, Artificial Sequence
  Description of Artificial Sequence: Synthetic oligonucleotide
  5' Phos
gtcagctgaacgcagctgaacgca

SEQ ID NO: 1838 - DNA, 24 bp, Artificial Sequence
  Description of Artificial Sequence: Synthetic oligonucleotide
  5' Phos
gtcacgctgaagcacgctgaagca

SEQ ID NO: 1839 - DNA, 24 bp, Artificial Sequence
  Description of Artificial Sequence: Synthetic oligonucleotide
  5' Phos
gtcagaggcaagcagaggcaagca

SEQ ID NO: 1840 - DNA, 24 bp, Artificial Sequence
  Description of Artificial Sequence: Synthetic oligonucleotide
  5' Phos
gtcagccagttccagccagttcca

SEQ ID NO: 1841 - DNA, 24 bp, Artificial Sequence
  Description of Artificial Sequence: Synthetic oligonucleotide
  5' Phos
gtcactccaatacactccaataca

SEQ ID NO: 1842 - DNA, 24 bp, Artificial Sequence
  Description of Artificial Sequence: Synthetic oligonucleotide
  5' Phos
gtcaccgttccacaccgttccaca

SEQ ID NO: 1843 - DNA, 24 bp, Artificial Sequence
  Description of Artificial Sequence: Synthetic oligonucleotide
  5' Phos
gtcacgactccacacgactccaca

SEQ ID NO: 1844 - DNA, 24 bp, Artificial Sequence
  Description of Artificial Sequence: Synthetic oligonucleotide
  5' Phos
gtcatggccacacatggccacaca

SEQ ID NO: 1845 - DNA, 24 bp, Artificial Sequence
  Description of Artificial Sequence: Synthetic oligonucleotide
  5' Phos
gtcacctcttaacacctcttaaca

SEQ ID NO: 1846 - DNA, 24 bp, Artificial Sequence
  Description of Artificial Sequence: Synthetic oligonucleotide
  5' Phos
gtcagtgagtaacagtgagtaaca

SEQ ID NO: 1847 - DNA, 24 bp, Artificial Sequence
  Description of Artificial Sequence: Synthetic oligonucleotide
  5' Phos
gtcagctgcgaacagctgcgaaca

SEQ ID NO: 1848 - DNA, 24 bp, Artificial Sequence
  Description of Artificial Sequence: Synthetic oligonucleotide
  5' Phos
gtcatatgccaacatatgccaaca

SEQ ID NO: 1849 - DNA, 24 bp, Artificial Sequence
  Description of Artificial Sequence: Synthetic oligonucleotide
  5' Phos
gtcactgcacttaactgcacttaa

SEQ ID NO: 1850 - DNA, 24 bp, Artificial Sequence
  Description of Artificial Sequence: Synthetic oligonucleotide
  5' Phos
gtcaggatctctaaggatctctaa

SEQ ID NO: 1851 - DNA, 24 bp, Artificial Sequence
  Description of Artificial Sequence: Synthetic oligonucleotide
  5' Phos
gtcatctgacctaatctgacctaa

SEQ ID NO: 1852 - DNA, 24 bp, Artificial Sequence
  Description of Artificial Sequence: Synthetic oligonucleotide
  5' Phos
gtcacaggagataacaggagataa

SEQ ID NO: 1853 - DNA, 24 bp, Artificial Sequence
  Description of Artificial Sequence: Synthetic oligonucleotide
  5' Phos
gtcacgacactgaacgacactgaa

SEQ ID NO: 1854 - DNA, 24 bp, Artificial Sequence
  Description of Artificial Sequence: Synthetic oligonucleotide
  5' Phos
gtcacttcttggaacttcttggaa

SEQ ID NO: 1855 - DNA, 24 bp, Artificial Sequence
  Description of Artificial Sequence: Synthetic oligonucleotide
  5' Phos
gtcatgcggtggaatgcggtggaa

SEQ ID NO: 1856 - DNA, 24 bp, Artificial Sequence
  Description of Artificial Sequence: Synthetic oligonucleotide
  5' Phos
gtcagatagtggaagatagtggaa

SEQ ID NO: 1857 - DNA, 24 bp, Artificial Sequence
  Description of Artificial Sequence: Synthetic oligonucleotide
  5' Phos
gtcatcaagtggaatcaagtggaa

SEQ ID NO: 1858 - DNA, 24 bp, Artificial Sequence
  Description of Artificial Sequence: Synthetic oligonucleotide
  5' Phos
gtcagctctcggaagctctcggaa

SEQ ID NO: 1859 - DNA, 24 bp, Artificial Sequence
  Description of Artificial Sequence: Synthetic oligonucleotide
  5' Phos
gtcaggctcaggaaggctcaggaa

SEQ ID NO: 1860 - DNA, 24 bp, Artificial Sequence
  Description of Artificial Sequence: Synthetic oligonucleotide
  5' Phos
gtcagcgactcgaagcgactcgaa

SEQ ID NO: 1861 - DNA, 24 bp, Artificial Sequence
  Description of Artificial Sequence: Synthetic oligonucleotide
  5' Phos
gtcactggcacgaactggcacgaa

SEQ ID NO: 1862 - DNA, 24 bp, Artificial Sequence
  Description of Artificial Sequence: Synthetic oligonucleotide
  5' Phos
gtcatggtgtagaatggtgtagaa

SEQ ID NO: 1863 - DNA, 24 bp, Artificial Sequence
  Description of Artificial Sequence: Synthetic oligonucleotide
  5' Phos
gtcaggagcgagaaggagcgagaa

SEQ ID NO: 1864 - DNA, 24 bp, Artificial Sequence
  Description of Artificial Sequence: Synthetic oligonucleotide
  5' Phos
gtcagtggccagaagtggccagaa

SEQ ID NO: 1865 - DNA, 24 bp, Artificial Sequence
  Description of Artificial Sequence: Synthetic oligonucleotide
  5' Phos
gtcacaccattcaacaccattcaa

SEQ ID NO: 1866 - DNA, 24 bp, Artificial Sequence
  Description of Artificial Sequence: Synthetic oligonucleotide
  5' Phos
gtcagtcggctcaagtcggctcaa

SEQ ID NO: 1867 - DNA, 24 bp, Artificial Sequence
  Description of Artificial Sequence: Synthetic oligonucleotide
  5' Phos
gtcacttggcgcaacttggcgcaa

SEQ ID NO: 1868 - DNA, 24 bp, Artificial Sequence
  Description of Artificial Sequence: Synthetic oligonucleotide
  5' Phos
gtcactaagagcaactaagagcaa

SEQ ID NO: 1869 - DNA, 24 bp, Artificial Sequence
  Description of Artificial Sequence: Synthetic oligonucleotide
  5' Phos
gtcagccttgccaagccttgccaa

SEQ ID NO: 1870 - DNA, 24 bp, Artificial Sequence
  Description of Artificial Sequence: Synthetic oligonucleotide
  5' Phos
gtcacgtgagccaacgtgagccaa

SEQ ID NO: 1871 - DNA, 24 bp, Artificial Sequence
  Description of Artificial Sequence: Synthetic oligonucleotide
  5' Phos
gtcatggaagccaatggaagccaa

SEQ ID NO: 1872 - DNA, 24 bp, Artificial Sequence
  Description of Artificial Sequence: Synthetic oligonucleotide
  5' Phos
gtcagtatccacaagtatccacaa

SEQ ID NO: 1873 - DNA, 24 bp, Artificial Sequence
  Description of Artificial Sequence: Synthetic oligonucleotide
  5' Phos
gtcacatccgtgttcatccgtgtt

SEQ ID NO: 1874 - DNA, 24 bp, Artificial Sequence
  Description of Artificial Sequence: Synthetic oligonucleotide
  5' Phos
gtcaccggtctgttccggtctgtt

SEQ ID NO: 1875 - DNA, 24 bp, Artificial Sequence
  Description of Artificial Sequence: Synthetic oligonucleotide
  5' Phos
gtcagatcactgttgatcactgtt

SEQ ID NO: 1876 - DNA, 24 bp, Artificial Sequence
  Description of Artificial Sequence: Synthetic oligonucleotide
  5' Phos
gtcacaagatggttcaagatggtt

SEQ ID NO: 1877 - DNA, 24 bp, Artificial Sequence
  Description of Artificial Sequence: Synthetic oligonucleotide
  5' Phos
gtcacgtcaccgttcgtcaccgtt

SEQ ID NO: 1878 - DNA, 24 bp, Artificial Sequence
  Description of Artificial Sequence: Synthetic oligonucleotide
  5' Phos
gtcaccgcgtagttccgcgtagtt

SEQ ID NO: 1879 - DNA, 24 bp, Artificial Sequence
  Description of Artificial Sequence: Synthetic oligonucleotide
  5' Phos
gtcaaagcctagttaagcctagtt

SEQ ID NO: 1880 - DNA, 24 bp, Artificial Sequence
  Description of Artificial Sequence: Synthetic oligonucleotide
  5' Phos
gtcacacgccagttcacgccagtt

SEQ ID NO: 1881 - DNA, 24 bp, Artificial Sequence
  Description of Artificial Sequence: Synthetic oligonucleotide
  5' Phos
gtcaatcctgtcttatcctgtctt

SEQ ID NO: 1882 - DNA, 24 bp, Artificial Sequence
  Description of Artificial Sequence: Synthetic oligonucleotide
  5' Phos
gtcaactggctcttactggctctt

SEQ ID NO: 1883 - DNA, 24 bp, Artificial Sequence
  Description of Artificial Sequence: Synthetic oligonucleotide
  5' Phos
gtcacgatactcttcgatactctt

SEQ ID NO: 1884 - DNA, 24 bp, Artificial Sequence
  Description of Artificial Sequence: Synthetic oligonucleotide
  5' Phos
gtcaagtgttccttagtgttcctt

SEQ ID NO: 1885 - DNA, 24 bp, Artificial Sequence
  Description of Artificial Sequence: Synthetic oligonucleotide
  5' Phos
gtcacctgcgacttcctgcgactt

SEQ ID NO: 1886 - DNA, 24 bp, Artificial Sequence
  Description of Artificial Sequence: Synthetic oligonucleotide
  5' Phos
gtcagactgtgattgactgtgatt

SEQ ID NO: 1887 - DNA, 24 bp, Artificial Sequence
  Description of Artificial Sequence: Synthetic oligonucleotide
  5' Phos
gtcaaatggcgattaatggcgatt

SEQ ID NO: 1888 - DNA, 24 bp, Artificial Sequence
  Description of Artificial Sequence: Synthetic oligonucleotide
  5' Phos
gtcaggccgcaattggccgcaatt

SEQ ID NO: 1889 - DNA, 24 bp, Artificial Sequence
  Description of Artificial Sequence: Synthetic oligonucleotide
  5' Phos
gtcacgcgagttgtcgcgagttgt

SEQ ID NO: 1890 - DNA, 24 bp, Artificial Sequence
  Description of Artificial Sequence: Synthetic oligonucleotide
  5' Phos
gtcacgcagcttgtcgcagcttgt

SEQ ID NO: 1891 - DNA, 24 bp, Artificial Sequence
  Description of Artificial Sequence: Synthetic oligonucleotide
  5' Phos
gtcagaattggtgtgaattggtgt

SEQ ID NO: 1892 - DNA, 24 bp, Artificial Sequence
  Description of Artificial Sequence: Synthetic oligonucleotide
  5' Phos
gtcaaccttcgtgtaccttcgtgt

SEQ ID NO: 1893 - DNA, 24 bp, Artificial Sequence
  Description of Artificial Sequence: Synthetic oligonucleotide
  5' Phos
gtcacacattctgtcacattctgt

SEQ ID NO: 1894 - DNA, 24 bp, Artificial Sequence
  Description of Artificial Sequence: Synthetic oligonucleotide
  5' Phos
gtcaaccactatgtaccactatgt

SEQ ID NO: 1895 - DNA, 24 bp, Artificial Sequence
  Description of Artificial Sequence: Synthetic oligonucleotide
  5' Phos
gtcaacgtggtggtacgtggtggt

SEQ ID NO: 1896 - DNA, 24 bp, Artificial Sequence
  Description of Artificial Sequence: Synthetic oligonucleotide
  5' Phos
gtcaagctgtcggtagctgtcggt

SEQ ID NO: 1897 - DNA, 24 bp, Artificial Sequence
  Description of Artificial Sequence: Synthetic oligonucleotide
  5' Phos
gtcaactagccggtactagccggt

SEQ ID NO: 1898 - DNA, 24 bp, Artificial Sequence
  Description of Artificial Sequence: Synthetic oligonucleotide
  5' Phos
gtcaaatctacggtaatctacggt

SEQ ID NO: 1899 - DNA, 24 bp, Artificial Sequence
  Description of Artificial Sequence: Synthetic oligonucleotide
  5' Phos
gtcaaagtcacggtaagtcacggt

SEQ ID NO: 1900 - DNA, 24 bp, Artificial Sequence
  Description of Artificial Sequence: Synthetic oligonucleotide
  5' Phos
gtcagttgtgaggtgttgtgaggt

SEQ ID NO: 1901 - DNA, 24 bp, Artificial Sequence
  Description of Artificial Sequence: Synthetic oligonucleotide
  5' Phos
gtcaaggacaaggtaggacaaggt

SEQ ID NO: 1902 - DNA, 24 bp, Artificial Sequence
  Description of Artificial Sequence: Synthetic oligonucleotide
  5' Phos
gtcacctgcttcgtcctgcttcgt

SEQ ID NO: 1903 - DNA, 24 bp, Artificial Sequence
  Description of Artificial Sequence: Synthetic oligonucleotide
  5' Phos
gtcagtccagtcgtgtccagtcgt

SEQ ID NO: 1904 - DNA, 24 bp, Artificial Sequence
  Description of Artificial Sequence: Synthetic oligonucleotide
  5' Phos
gtcactgctctcgtctgctctcgt

SEQ ID NO: 1905 - DNA, 24 bp, Artificial Sequence
  Description of Artificial Sequence: Synthetic oligonucleotide
  5' Phos
gtcacaacaggcgtcaacaggcgt

SEQ ID NO: 1906 - DNA, 24 bp, Artificial Sequence
  Description of Artificial Sequence: Synthetic oligonucleotide
  5' Phos
gtcagaagtcgcgtgaagtcgcgt

SEQ ID NO: 1907 - DNA, 24 bp, Artificial Sequence
  Description of Artificial Sequence: Synthetic oligonucleotide
  5' Phos
gtcaatcaatccgtatcaatccgt

SEQ ID NO: 1908 - DNA, 24 bp, Artificial Sequence
  Description of Artificial Sequence: Synthetic oligonucleotide
  5' Phos
gtcacatgagccgtcatgagccgt

SEQ ID NO: 1909 - DNA, 24 bp, Artificial Sequence
  Description of Artificial Sequence: Synthetic oligonucleotide
  5' Phos
gtcaatcttaccgtatcttaccgt

SEQ ID NO: 1910 - DNA, 24 bp, Artificial Sequence
  Description of Artificial Sequence: Synthetic oligonucleotide
  5' Phos
gtcagtgctaccgtgtgctaccgt

SEQ ID NO: 1911 - DNA, 24 bp, Artificial Sequence
  Description of Artificial Sequence: Synthetic oligonucleotide
  5' Phos
gtcacgaacaccgtcgaacaccgt

SEQ ID NO: 1912 - DNA, 24 bp, Artificial Sequence
  Description of Artificial Sequence: Synthetic oligonucleotide
  5' Phos
gtcaccatcgacgtccatcgacgt

SEQ ID NO: 1913 - DNA, 24 bp, Artificial Sequence
  Description of Artificial Sequence: Synthetic oligonucleotide
  5' Phos
gtcagtctgcacgtgtctgcacgt

SEQ ID NO: 1914 - DNA, 24 bp, Artificial Sequence
  Description of Artificial Sequence: Synthetic oligonucleotide
  5' Phos
gtcagctggaacgtgctggaacgt

SEQ ID NO: 1915 - DNA, 24 bp, Artificial Sequence
  Description of Artificial Sequence: Synthetic oligonucleotide
  5' Phos
gtcaacaagctagtacaagctagt

SEQ ID NO: 1916 - DNA, 24 bp, Artificial Sequence
  Description of Artificial Sequence: Synthetic oligonucleotide
  5' Phos
gtcagcgtcctagtgcgtcctagt

SEQ ID NO: 1917 - DNA, 24 bp, Artificial Sequence
  Description of Artificial Sequence: Synthetic oligonucleotide
  5' Phos
gtcaccaggtgagtccaggtgagt

SEQ ID NO: 1918 - DNA, 24 bp, Artificial Sequence
  Description of Artificial Sequence: Synthetic oligonucleotide
  5' Phos
gtcacgatatgagtcgatatgagt

SEQ ID NO: 1919 - DNA, 24 bp, Artificial Sequence
  Description of Artificial Sequence: Synthetic oligonucleotide
  5' Phos
gtcacacggtcagtcacggtcagt

SEQ ID NO: 1920 - DNA, 24 bp, Artificial Sequence
  Description of Artificial Sequence: Synthetic oligonucleotide
  5' Phos
gtcaggttagaagtggttagaagt

SEQ ID NO: 1921 - DNA, 24 bp, Artificial Sequence
  Description of Artificial Sequence: Synthetic oligonucleotide
  5' Phos
gggaagcgccaagtagcgccaagt

SEQ ID NO: 1922 - DNA, 24 bp, Artificial Sequence
  Description of Artificial Sequence: Synthetic oligonucleotide
  5' Phos
gggaggagcgttctggagcgttct

SEQ ID NO: 1923 - DNA, 24 bp, Artificial Sequence
  Description of Artificial Sequence: Synthetic oligonucleotide
  5' Phos
gggacctaagttctcctaagttct

SEQ ID NO: 1924 - DNA, 24 bp, Artificial Sequence
  Description of Artificial Sequence: Synthetic oligonucleotide
  5' Phos
gggaatgcgcttctatgcgcttct

SEQ ID NO: 1925 - DNA, 24 bp, Artificial Sequence
  Description of Artificial Sequence: Synthetic oligonucleotide
  5' Phos
gggagctattgtctgctattgtct

SEQ ID NO: 1926 - DNA, 24 bp, Artificial Sequence
  Description of Artificial Sequence: Synthetic oligonucleotide
  5' Phos
gggagtctcggtctgtctcggtct

SEQ ID NO: 1927 - DNA, 24 bp, Artificial Sequence
  Description of Artificial Sequence: Synthetic oligonucleotide
  5' Phos
gggagacagcgtctgacagcgtct

SEQ ID NO: 1928 - DNA, 24 bp, Artificial Sequence
  Description of Artificial Sequence: Synthetic oligonucleotide
  5' Phos
gggacgctacgtctcgctacgtct

SEQ ID NO: 1929 - DNA, 24 bp, Artificial Sequence
  Description of Artificial Sequence: Synthetic oligonucleotide
  5' Phos
gggaagagctctctagagctctct

SEQ ID NO: 1930 - DNA, 24 bp, Artificial Sequence
  Description of Artificial Sequence: Synthetic oligonucleotide
  5' Phos
gggaagtggcctctagtggcctct

SEQ ID NO: 1931 - DNA, 24 bp, Artificial Sequence
  Description of Artificial Sequence: Synthetic oligonucleotide
  5' Phos
gggagcggcaatctgcggcaatct

SEQ ID NO: 1932 - DNA, 24 bp, Artificial Sequence
  Description of Artificial Sequence: Synthetic oligonucleotide
  5' Phos
gggagcatcgtgctgcatcgtgct

SEQ ID NO: 1933 - DNA, 24 bp, Artificial Sequence
  Description of Artificial Sequence: Synthetic oligonucleotide
  5' Phos
gggaattctctgctattctctgct

SEQ ID NO: 1934 - DNA, 24 bp, Artificial Sequence
  Description of Artificial Sequence: Synthetic oligonucleotide
  5' Phos
gggaccttgtggctccttgtggct

SEQ ID NO: 1935 - DNA, 24 bp, Artificial Sequence
  Description of Artificial Sequence: Synthetic oligonucleotide
  5' Phos
gggacttcctggctcttcctggct

SEQ ID NO: 1936 - DNA, 24 bp, Artificial Sequence
  Description of Artificial Sequence: Synthetic oligonucleotide
  5' Phos
gggactccagagctctccagagct

SEQ ID NO: 1937 - DNA, 24 bp, Artificial Sequence
  Description of Artificial Sequence: Synthetic oligonucleotide
  5' Phos
gggactgccaagctctgccaagct

SEQ ID NO: 1938 - DNA, 24 bp, Artificial Sequence
  Description of Artificial Sequence: Synthetic oligonucleotide
  5' Phos
gggacgttattcctcgttattcct

SEQ ID NO: 1939 - DNA, 24 bp, Artificial Sequence
  Description of Artificial Sequence: Synthetic oligonucleotide
  5' Phos
gggagtcaattcctgtcaattcct

SEQ ID NO: 1940 - DNA, 24 bp, Artificial Sequence
  Description of Artificial Sequence: Synthetic oligonucleotide
  5' Phos
gggaaattcctcctaattcctcct

SEQ ID NO: 1941 - DNA, 24 bp, Artificial Sequence
  Description of Artificial Sequence: Synthetic oligonucleotide
  5' Phos
gggaggcctatcctggcctatcct

SEQ ID NO: 1942 - DNA, 24 bp, Artificial Sequence
  Description of Artificial Sequence: Synthetic oligonucleotide
  5' Phos
gggaaaggccacctaaggccacct

SEQ ID NO: 1943 - DNA, 24 bp, Artificial Sequence
  Description of Artificial Sequence: Synthetic oligonucleotide
  5' Phos
gggacgcaacacctcgcaacacct

SEQ ID NO: 1944 - DNA, 24 bp, Artificial Sequence
  Description of Artificial Sequence: Synthetic oligonucleotide
  5' Phos
gggacacctaacctcacctaacct

SEQ ID NO: 1945 - DNA, 24 bp, Artificial Sequence
  Description of Artificial Sequence: Synthetic oligonucleotide
  5' Phos
gggaaggacggactaggacggact

SEQ ID NO: 1946 - DNA, 24 bp, Artificial Sequence
  Description of Artificial Sequence: Synthetic oligonucleotide
  5' Phos
gggacggatcgactcggatcgact

SEQ ID NO: 1947 - DNA, 24 bp, Artificial Sequence
  Description of Artificial Sequence: Synthetic oligonucleotide
  5' Phos
gggaagcagcgactagcagcgact

SEQ ID NO: 1948 - DNA, 24 bp, Artificial Sequence
  Description of Artificial Sequence: Synthetic oligonucleotide
  5' Phos
gggagaggacgactgaggacgact

SEQ ID NO: 1949 - DNA, 24 bp, Artificial Sequence
  Description of Artificial Sequence: Synthetic oligonucleotide
  5' Phos
gggaacggaacactacggaacact

SEQ ID NO: 1950 - DNA, 24 bp, Artificial Sequence
  Description of Artificial Sequence: Synthetic oligonucleotide
  5' Phos
gggaatgagcaactatgagcaact

SEQ ID NO: 1951 - DNA, 24 bp, Artificial Sequence
  Description of Artificial Sequence: Synthetic oligonucleotide
  5' Phos
gggactcacgttatctcacgttat

SEQ ID NO: 1952 - DNA, 24 bp, Artificial Sequence
  Description of Artificial Sequence: Synthetic oligonucleotide
  5' Phos
gggagcctgcgtatgcctgcgtat

SEQ ID NO: 1953 - DNA, 24 bp, Artificial Sequence
  Description of Artificial Sequence: Synthetic oligonucleotide
  5' Phos
gggagcatcagtatgcatcagtat

SEQ ID NO: 1954 - DNA, 24 bp, Artificial Sequence
  Description of Artificial Sequence: Synthetic oligonucleotide
  5' Phos
gggagacgaactatgacgaactat

SEQ ID NO: 1955 - DNA, 24 bp, Artificial Sequence
  Description of Artificial Sequence: Synthetic oligonucleotide
  5' Phos
gggagcgaagatatgcgaagatat

SEQ ID NO: 1956 - DNA, 24 bp, Artificial Sequence
  Description of Artificial Sequence: Synthetic oligonucleotide
  5' Phos
gggagaaggcatatgaaggcatat

SEQ ID NO: 1957 - DNA, 24 bp, Artificial Sequence
  Description of Artificial Sequence: Synthetic oligonucleotide
  5' Phos
gggagtgatctgatgtgatctgat

SEQ ID NO: 1958 - DNA, 24 bp, Artificial Sequence
  Description of Artificial Sequence: Synthetic oligonucleotide
  5' Phos
gggacagattggatcagattggat

SEQ ID NO: 1959 - DNA, 24 bp, Artificial Sequence
  Description of Artificial Sequence: Synthetic oligonucleotide
  5' Phos
gggacgctgtggatcgctgtggat

SEQ ID NO: 1960 - DNA, 24 bp, Artificial Sequence
  Description of Artificial Sequence: Synthetic oligonucleotide
  5' Phos
gggacgttccggatcgttccggat

SEQ ID NO: 1961 - DNA, 24 bp, Artificial Sequence
  Description of Artificial Sequence: Synthetic oligonucleotide
  5' Phos
gggaggaagccgatggaagccgat

SEQ ID NO: 1962 - DNA, 24 bp, Artificial Sequence
  Description of Artificial Sequence: Synthetic oligonucleotide
  5' Phos
gggactccgacgatctccgacgat

SEQ ID NO: 1963 - DNA, 24 bp, Artificial Sequence
  Description of Artificial Sequence: Synthetic oligonucleotide
  5' Phos
gggacgtgagagatcgtgagagat

SEQ ID NO: 1964 - DNA, 24 bp, Artificial Sequence
  Description of Artificial Sequence: Synthetic oligonucleotide
  5' Phos
gggagcaggtgcatgcaggtgcat

SEQ ID NO: 1965 - DNA, 24 bp, Artificial Sequence
  Description of Artificial Sequence: Synthetic oligonucleotide
  5' Phos
gggagcgactgcatgcgactgcat

SEQ ID NO: 1966 - DNA, 24 bp, Artificial Sequence
  Description of Artificial Sequence: Synthetic oligonucleotide
  5' Phos
gggacctacggcatcctacggcat

SEQ ID NO: 1967 - DNA, 24 bp, Artificial Sequence
  Description of Artificial Sequence: Synthetic oligonucleotide
  5' Phos
gggagatcgcgcatgatcgcgcat

SEQ ID NO: 1968 - DNA, 24 bp, Artificial Sequence
  Description of Artificial Sequence: Synthetic oligonucleotide
  5' Phos
gggaatcaccacatatcaccacat

SEQ ID NO: 1969 - DNA, 24 bp, Artificial Sequence
  Description of Artificial Sequence: Synthetic oligonucleotide
  5' Phos
gggaggctcgtaatggctcgtaat

SEQ ID NO: 1970 - DNA, 24 bp, Artificial Sequence
  Description of Artificial Sequence: Synthetic oligonucleotide
  5' Phos
gggagccgtggaatgccgtggaat

SEQ ID NO: 1971 - DNA, 24 bp, Artificial Sequence
  Description of Artificial Sequence: Synthetic oligonucleotide
  5' Phos
gggagacgccgaatgacgccgaat

SEQ ID NO: 1972 - DNA, 24 bp, Artificial Sequence
  Description of Artificial Sequence: Synthetic oligonucleotide
  5' Phos
gggaggcttccaatggcttccaat

SEQ ID NO: 1973 - DNA, 24 bp, Artificial Sequence
  Description of Artificial Sequence: Synthetic oligonucleotide
  5' Phos
gggaggccgacaatggccgacaat

SEQ ID NO: 1974 - DNA, 24 bp, Artificial Sequence
  Description of Artificial Sequence: Synthetic oligonucleotide
  5' Phos
gggacaagcggttgcaagcggttg

SEQ ID NO: 1975 - DNA, 24 bp, Artificial Sequence
  Description of Artificial Sequence: Synthetic oligonucleotide
  5' Phos
gggaccaccagttgccaccagttg

SEQ ID NO: 1976 - DNA, 24 bp, Artificial Sequence
  Description of Artificial Sequence: Synthetic oligonucleotide
  5' Phos
gggacaccatcttgcaccatcttg

SEQ ID NO: 1977 - DNA, 24 bp, Artificial Sequence
  Description of Artificial Sequence: Synthetic oligonucleotide
  5' Phos
gggatcgaatcttgtcgaatcttg

SEQ ID NO: 1978 - DNA, 24 bp, Artificial Sequence
  Description of Artificial Sequence: Synthetic oligonucleotide
  5' Phos
gggactcgtgcttgctcgtgcttg

SEQ ID NO: 1979 - DNA, 24 bp, Artificial Sequence
  Description of Artificial Sequence: Synthetic oligonucleotide
  5' Phos
gggacacaggcttgcacaggcttg

SEQ ID NO: 1980 - DNA, 24 bp, Artificial Sequence
  Description of Artificial Sequence: Synthetic oligonucleotide
  5' Phos
gggacgtgagcttgcgtgagcttg

SEQ ID NO: 1981 - DNA, 24 bp, Artificial Sequence
  Description of Artificial Sequence: Synthetic oligonucleotide
  5' Phos
gggacgcaaccttgcgcaaccttg

SEQ ID NO: 1982 - DNA, 24 bp, Artificial Sequence
  Description of Artificial Sequence: Synthetic oligonucleotide
  5' Phos
gggacgtcgacttgcgtcgacttg

SEQ ID NO: 1983 - DNA, 24 bp, Artificial Sequence
  Description of Artificial Sequence: Synthetic oligonucleotide
  5' Phos
gggacttcgtggtgcttcgtggtg

SEQ ID NO: 1984 - DNA, 24 bp, Artificial Sequence
  Description of Artificial Sequence: Synthetic oligonucleotide
  5' Phos
gggaaatatcggtgaatatcggtg

SEQ ID NO: 1985 - DNA, 24 bp, Artificial Sequence
  Description of Artificial Sequence: Synthetic oligonucleotide
  5' Phos
gggattcgacggtgttcgacggtg

SEQ ID NO: 1986 - DNA, 24 bp, Artificial Sequence
  Description of Artificial Sequence: Synthetic oligonucleotide
  5' Phos
gggatgtcacggtgtgtcacggtg

SEQ ID NO: 1987 - DNA, 24 bp, Artificial Sequence
  Description of Artificial Sequence: Synthetic oligonucleotide
  5' Phos
gggatcagcaggtgtcagcaggtg

SEQ ID NO: 1988 - DNA, 24 bp, Artificial Sequence
  Description of Artificial Sequence: Synthetic oligonucleotide
  5' Phos
gggatatgtgcgtgtatgtgcgtg

SEQ ID NO: 1989 - DNA, 24 bp, Artificial Sequence
  Description of Artificial Sequence: Synthetic oligonucleotide
  5' Phos
gggaccttagcgtgccttagcgtg

SEQ ID NO: 1990 - DNA, 24 bp, Artificial Sequence
  Description of Artificial Sequence: Synthetic oligonucleotide
  5' Phos
gggaagattacgtgagattacgtg

SEQ ID NO: 1991 - DNA, 24 bp, Artificial Sequence
  Description of Artificial Sequence: Synthetic oligonucleotide
  5' Phos
gggaactccacgtgactccacgtg

SEQ ID NO: 1992 - DNA, 24 bp, Artificial Sequence
  Description of Artificial Sequence: Synthetic oligonucleotide
  5' Phos
gggactctcgagtgctctcgagtg

SEQ ID NO: 1993 - DNA, 24 bp, Artificial Sequence
  Description of Artificial Sequence: Synthetic oligonucleotide
  5' Phos
gggatcagagagtgtcagagagtg

SEQ ID NO: 1994 - DNA, 24 bp, Artificial Sequence
  Description of Artificial Sequence: Synthetic oligonucleotide
  5' Phos
gggaagccagagtgagccagagtg

SEQ ID NO: 1995 - DNA, 24 bp, Artificial Sequence
  Description of Artificial Sequence: Synthetic oligonucleotide
  5' Phos
gggacatggcagtgcatggcagtg

SEQ ID NO: 1996 - DNA, 24 bp, Artificial Sequence
  Description of Artificial Sequence: Synthetic oligonucleotide
  5' Phos
gggaagttcaagtgagttcaagtg

SEQ ID NO: 1997 - DNA, 24 bp, Artificial Sequence
  Description of Artificial Sequence: Synthetic oligonucleotide
  5' Phos
gggactcaggtctgctcaggtctg

SEQ ID NO: 1998 - DNA, 24 bp, Artificial Sequence
  Description of Artificial Sequence: Synthetic oligonucleotide
  5' Phos
gggaatgctcgctgatgctcgctg

SEQ ID NO: 1999 - DNA, 24 bp, Artificial Sequence
  Description of Artificial Sequence: Synthetic oligonucleotide
  5' Phos
gggacctcttcctgcctcttcctg

SEQ ID NO: 2000 - DNA, 24 bp, Artificial Sequence
  Description of Artificial Sequence: Synthetic oligonucleotide
  5' Phos
gggatatgagactgtatgagactg

SEQ ID NO: 2001 - DNA, 24 bp, Artificial Sequence
  Description of Artificial Sequence: Synthetic oligonucleotide
  5' Phos
gggatcgataactgtcgataactg

SEQ ID NO: 2002 - DNA, 24 bp, Artificial Sequence
  Description of Artificial Sequence: Synthetic oligonucleotide
  5' Phos
gggacgcgtgtatgcgcgtgtatg

SEQ ID NO: 2003 - DNA, 24 bp, Artificial Sequence
  Description of Artificial Sequence: Synthetic oligonucleotide
  5' Phos
gggacgtcggtatgcgtcggtatg

SEQ ID NO: 2004 - DNA, 24 bp, Artificial Sequence
  Description of Artificial Sequence: Synthetic oligonucleotide
  5' Phos
gggaaccattgatgaccattgatg

SEQ ID NO: 2005 - DNA, 24 bp, Artificial Sequence
  Description of Artificial Sequence: Synthetic oligonucleotide
  5' Phos
gggacggtgtcatgcggtgtcatg

SEQ ID NO: 2006 - DNA, 24 bp, Artificial Sequence
  Description of Artificial Sequence: Synthetic oligonucleotide
  5' Phos
gggaccgaaccatgccgaaccatg

SEQ ID NO: 2007 - DNA, 24 bp, Artificial Sequence
  Description of Artificial Sequence: Synthetic oligonucleotide
  5' Phos
gggacgctccaatgcgctccaatg

SEQ ID NO: 2008 - DNA, 24 bp, Artificial Sequence
  Description of Artificial Sequence: Synthetic oligonucleotide
  5' Phos
gggactctcgttggctctcgttgg

SEQ ID NO: 2009 - DNA, 24 bp, Artificial Sequence
  Description of Artificial Sequence: Synthetic oligonucleotide
  5' Phos
gggactggtcttggctggtcttgg

SEQ ID NO: 2010 - DNA, 24 bp, Artificial Sequence
  Description of Artificial Sequence: Synthetic oligonucleotide
  5' Phos
gggaccgtgattggccgtgattgg

SEQ ID NO: 2011 - DNA, 24 bp, Artificial Sequence
  Description of Artificial Sequence: Synthetic oligonucleotide
  5' Phos
gggaacaacggtggacaacggtgg

SEQ ID NO: 2012 - DNA, 24 bp, Artificial Sequence
  Description of Artificial Sequence: Synthetic oligonucleotide
  5' Phos
gggatccgatctggtccgatctgg

SEQ ID NO: 2013 - DNA, 24 bp, Artificial Sequence
  Description of Artificial Sequence: Synthetic oligonucleotide
  5' Phos
gggactgacttcggctgacttcgg

SEQ ID NO: 2014 - DNA, 24 bp, Artificial Sequence
  Description of Artificial Sequence: Synthetic oligonucleotide
  5' Phos
gggaacttcagcggacttcagcgg

SEQ ID NO: 2015 - DNA, 24 bp, Artificial Sequence
  Description of Artificial Sequence: Synthetic oligonucleotide
  5' Phos
gggatatggtccggtatggtccgg

SEQ ID NO: 2016 - DNA, 24 bp, Artificial Sequence
  Description of Artificial Sequence: Synthetic oligonucleotide
  5' Phos
gggacctagaacggcctagaacgg

SEQ ID NO: 2017 - DNA, 24 bp, Artificial Sequence
  Description of Artificial Sequence: Synthetic oligonucleotide
  5' Phos
gggaccgcattaggccgcattagg

SEQ ID NO: 2018 - DNA, 24 bp, Artificial Sequence
  Description of Artificial Sequence: Synthetic oligonucleotide
  5' Phos
gggatcgtcataggtcgtcatagg

SEQ ID NO: 2019 - DNA, 24 bp, Artificial Sequence
  Description of Artificial Sequence: Synthetic oligonucleotide
  5' Phos
gggaactggtgaggactggtgagg

SEQ ID NO: 2020 - DNA, 24 bp, Artificial Sequence
  Description of Artificial Sequence: Synthetic oligonucleotide
  5' Phos
gggacgtcttcaggcgtcttcagg

SEQ ID NO: 2021 - DNA, 24 bp, Artificial Sequence
  Description of Artificial Sequence: Synthetic oligonucleotide
  5' Phos
gggaaggagtcaggaggagtcagg

SEQ ID NO: 2022 - DNA, 24 bp, Artificial Sequence
  Description of Artificial Sequence: Synthetic oligonucleotide
  5' Phos
gggaccactcttcgccactcttcg

SEQ ID NO: 2023 - DNA, 24 bp, Artificial Sequence
  Description of Artificial Sequence: Synthetic oligonucleotide
  5' Phos
gggaaccaccttcgaccaccttcg

SEQ ID NO: 2024 - DNA, 24 bp, Artificial Sequence
  Description of Artificial Sequence: Synthetic oligonucleotide
  5' Phos
gggactgctagtcgctgctagtcg

SEQ ID NO: 2025 - DNA, 24 bp, Artificial Sequence
  Description of Artificial Sequence: Synthetic oligonucleotide
  5' Phos
gggatctcgagtcgtctcgagtcg

SEQ ID NO: 2026 - DNA, 24 bp, Artificial Sequence
  Description of Artificial Sequence: Synthetic oligonucleotide
  5' Phos
gggattgtaagtcgttgtaagtcg

SEQ ID NO: 2027 - DNA, 24 bp, Artificial Sequence
  Description of Artificial Sequence: Synthetic oligonucleotide
  5' Phos
gggattaatcctcgttaatcctcg

SEQ ID NO: 2028 - DNA, 24 bp, Artificial Sequence
  Description of Artificial Sequence: Synthetic oligonucleotide
  5' Phos
gggaacatgcctcgacatgcctcg

SEQ ID NO: 2029 - DNA, 24 bp, Artificial Sequence
  Description of Artificial Sequence: Synthetic oligonucleotide
  5' Phos
gggaagcagactcgagcagactcg

SEQ ID NO: 2030 - DNA, 24 bp, Artificial Sequence
  Description of Artificial Sequence: Synthetic oligonucleotide
  5' Phos
gggatgctcactcgtgctcactcg

SEQ ID NO: 2031 - DNA, 24 bp, Artificial Sequence
  Description of Artificial Sequence: Synthetic oligonucleotide
  5' Phos
gggacttccgatcgcttccgatcg

SEQ ID NO: 2032 - DNA, 24 bp, Artificial Sequence
  Description of Artificial Sequence: Synthetic oligonucleotide
  5' Phos
gggacggtagatcgcggtagatcg

SEQ ID NO: 2033 - DNA, 24 bp, Artificial Sequence
  Description of Artificial Sequence: Synthetic oligonucleotide
  5' Phos
gggaaagcttggcgaagcttggcg

SEQ ID NO: 2034 - DNA, 24 bp, Artificial Sequence
  Description of Artificial Sequence: Synthetic oligonucleotide
  5' Phos
gggaaattctggcgaattctggcg

SEQ ID NO: 2035 - DNA, 24 bp, Artificial Sequence
  Description of Artificial Sequence: Synthetic oligonucleotide
  5' Phos
gggatccattcgcgtccattcgcg

SEQ ID NO: 2036 - DNA, 24 bp, Artificial Sequence
  Description of Artificial Sequence: Synthetic oligonucleotide
  5' Phos
gggaaggatgagcgaggatgagcg

SEQ ID NO: 2037 - DNA, 24 bp, Artificial Sequence
  Description of Artificial Sequence: Synthetic oligonucleotide
  5' Phos
gggacattcgagcgcattcgagcg

SEQ ID NO: 2038 - DNA, 24 bp, Artificial Sequence
  Description of Artificial Sequence: Synthetic oligonucleotide
  5' Phos
gggaatagtaagcgatagtaagcg

SEQ ID NO: 2039 - DNA, 24 bp, Artificial Sequence
  Description of Artificial Sequence: Synthetic oligonucleotide
  5' Phos
gggaacgctaagcgacgctaagcg

SEQ ID NO: 2040 - DNA, 24 bp, Artificial Sequence
  Description of Artificial Sequence: Synthetic oligonucleotide
  5' Phos
gggacttaagtccgcttaagtccg

SEQ ID NO: 2041 - DNA, 24 bp, Artificial Sequence
  Description of Artificial Sequence: Synthetic oligonucleotide
  5' Phos
gggattgttcgccgttgttcgccg

SEQ ID NO: 2042 - DNA, 24 bp, Artificial Sequence
  Description of Artificial Sequence: Synthetic oligonucleotide
  5' Phos
gggattccaagccgttccaagccg

SEQ ID NO: 2043 - DNA, 24 bp, Artificial Sequence
  Description of Artificial Sequence: Synthetic oligonucleotide
  5' Phos
gggaagcactaccgagcactaccg

SEQ ID NO: 2044 - DNA, 24 bp, Artificial Sequence
  Description of Artificial Sequence: Synthetic oligonucleotide
  5' Phos
gggatgtgtaaccgtgtgtaaccg

SEQ ID NO: 2045 - DNA, 24 bp, Artificial Sequence
  Description of Artificial Sequence: Synthetic oligonucleotide
  5' Phos
gggaacacggtacgacacggtacg

SEQ ID NO: 2046 - DNA, 24 bp, Artificial Sequence
  Description of Artificial Sequence: Synthetic oligonucleotide
  5' Phos
gggatggctctacgtggctctacg

SEQ ID NO: 2047 - DNA, 24 bp, Artificial Sequence
  Description of Artificial Sequence: Synthetic oligonucleotide
  5' Phos
gggacagtcctacgcagtcctacg

SEQ ID NO: 2048 - DNA, 24 bp, Artificial Sequence
  Description of Artificial Sequence: Synthetic oligonucleotide
  5' Phos
gggattgtgatacgttgtgatacg

SEQ ID NO: 2049 - DNA, 24 bp, Artificial Sequence
  Description of Artificial Sequence: Synthetic oligonucleotide
  5' Phos
gggatcgcaacacgtcgcaacacg

SEQ ID NO: 2050 - DNA, 24 bp, Artificial Sequence
  Description of Artificial Sequence: Synthetic oligonucleotide
  5' Phos
gggatggaccaacgtggaccaacg

SEQ ID NO: 2051 - DNA, 24 bp, Artificial Sequence
  Description of Artificial Sequence: Synthetic oligonucleotide
  5' Phos
gggatcggctgtagtcggctgtag

SEQ ID NO: 2052 - DNA, 24 bp, Artificial Sequence
  Description of Artificial Sequence: Synthetic oligonucleotide
  5' Phos
gggaccttgcgtagccttgcgtag

SEQ ID NO: 2053 - DNA, 24 bp, Artificial Sequence
  Description of Artificial Sequence: Synthetic oligonucleotide
  5' Phos
gggacacaccgtagcacaccgtag

SEQ ID NO: 2054 - DNA, 24 bp, Artificial Sequence
  Description of Artificial Sequence: Synthetic oligonucleotide
  5' Phos
gggaaggaacgtagaggaacgtag

SEQ ID NO: 2055 - DNA, 24 bp, Artificial Sequence
  Description of Artificial Sequence: Synthetic oligonucleotide
  5' Phos
gggactgcctctagctgcctctag

SEQ ID NO: 2056 - DNA, 24 bp, Artificial Sequence
  Description of Artificial Sequence: Synthetic oligonucleotide
  5' Phos
gggactggacctagctggacctag

SEQ ID NO: 2057 - DNA, 24 bp, Artificial Sequence
  Description of Artificial Sequence: Synthetic oligonucleotide
  5' Phos
gggaagcgacctagagcgacctag

SEQ ID NO: 2058 - DNA, 24 bp, Artificial Sequence
  Description of Artificial Sequence: Synthetic oligonucleotide
  5' Phos
gggaacggcgatagacggcgatag

SEQ ID NO: 2059 - DNA, 24 bp, Artificial Sequence
  Description of Artificial Sequence: Synthetic oligonucleotide
  5' Phos
gggaagatccatagagatccatag

SEQ ID NO: 2060 - DNA, 24 bp, Artificial Sequence
  Description of Artificial Sequence: Synthetic oligonucleotide
  5' Phos
gggaaactcgcgagaactcgcgag

SEQ ID NO: 2061 - DNA, 24 bp, Artificial Sequence
  Description of Artificial Sequence: Synthetic oligonucleotide
  5' Phos
gggattgccacgagttgccacgag

SEQ ID NO: 2062 - DNA, 24 bp, Artificial Sequence
  Description of Artificial Sequence: Synthetic oligonucleotide
  5' Phos
gggaagttgtagagagttgtagag

SEQ ID NO: 2063 - DNA, 24 bp, Artificial Sequence
  Description of Artificial Sequence: Synthetic oligonucleotide
  5' Phos
gggacgatatagagcgatatagag

SEQ ID NO: 2064 - DNA, 24 bp, Artificial Sequence
  Description of Artificial Sequence: Synthetic oligonucleotide
  5' Phos
gggatgaaggagagtgaaggagag

SEQ ID NO: 2065 - DNA, 24 bp, Artificial Sequence
  Description of Artificial Sequence: Synthetic oligonucleotide
  5' Phos
gggacgcaagagagcgcaagagag

SEQ ID NO: 2066 - DNA, 24 bp, Artificial Sequence
  Description of Artificial Sequence: Synthetic oligonucleotide
  5' Phos
gggacaacgcagagcaacgcagag

SEQ ID NO: 2067 - DNA, 24 bp, Artificial Sequence
  Description of Artificial Sequence: Synthetic oligonucleotide
  5' Phos
gggactggattcagctggattcag

SEQ ID NO: 2068 - DNA, 24 bp, Artificial Sequence
  Description of Artificial Sequence: Synthetic oligonucleotide
  5' Phos
gggaccaagctcagccaagctcag

SEQ ID NO: 2069 - DNA, 24 bp, Artificial Sequence
  Description of Artificial Sequence: Synthetic oligonucleotide
  5' Phos
gggatcggatccagtcggatccag

SEQ ID NO: 2070 - DNA, 24 bp, Artificial Sequence
  Description of Artificial Sequence: Synthetic oligonucleotide
  5' Phos
gggaatcagaccagatcagaccag

SEQ ID NO: 2071 - DNA, 24 bp, Artificial Sequence
  Description of Artificial Sequence: Synthetic oligonucleotide
  5' Phos
gggactgtggacagctgtggacag

SEQ ID NO: 2072 - DNA, 24 bp, Artificial Sequence
  Description of Artificial Sequence: Synthetic oligonucleotide
  5' Phos
gggaaggaggacagaggaggacag

SEQ ID NO: 2073 - DNA, 24 bp, Artificial Sequence
  Description of Artificial Sequence: Synthetic oligonucleotide
  5' Phos
gggacatccgacagcatccgacag

SEQ ID NO: 2074 - DNA, 24 bp, Artificial Sequence
  Description of Artificial Sequence: Synthetic oligonucleotide
  5' Phos
gggatcagatgaagtcagatgaag

SEQ ID NO: 2075 - DNA, 24 bp, Artificial Sequence
  Description of Artificial Sequence: Synthetic oligonucleotide
  5' Phos
gggaacgcaggaagacgcaggaag

SEQ ID NO: 2076 - DNA, 24 bp, Artificial Sequence
  Description of Artificial Sequence: Synthetic oligonucleotide
  5' Phos
gggactagccgaagctagccgaag

SEQ ID NO: 2077 - DNA, 24 bp, Artificial Sequence
  Description of Artificial Sequence: Synthetic oligonucleotide
  5' Phos
gggaccataagaagccataagaag

SEQ ID NO: 2078 - DNA, 24 bp, Artificial Sequence
  Description of Artificial Sequence: Synthetic oligonucleotide
  5' Phos
gggaatccaagaagatccaagaag

SEQ ID NO: 2079 - DNA, 24 bp, Artificial Sequence
  Description of Artificial Sequence: Synthetic oligonucleotide
  5' Phos
gggaccatcgcaagccatcgcaag

SEQ ID NO: 2080 - DNA, 24 bp, Artificial Sequence
  Description of Artificial Sequence: Synthetic oligonucleotide
  5' Phos
gggagctgaggttcgctgaggttc

SEQ ID NO: 2081 - DNA, 24 bp, Artificial Sequence
  Description of Artificial Sequence: Synthetic oligonucleotide
  5' Phos
gggataatccgttctaatccgttc

SEQ ID NO: 2082 - DNA, 24 bp, Artificial Sequence
  Description of Artificial Sequence: Synthetic oligonucleotide
  5' Phos
gggaaatgacgttcaatgacgttc

SEQ ID NO: 2083 - DNA, 24 bp, Artificial Sequence
  Description of Artificial Sequence: Synthetic oligonucleotide
  5' Phos
gggaggatcagttcggatcagttc

SEQ ID NO: 2084 - DNA, 24 bp, Artificial Sequence
  Description of Artificial Sequence: Synthetic oligonucleotide
  5' Phos
gggagactgctgtcgactgctgtc

SEQ ID NO: 2085 - DNA, 24 bp, Artificial Sequence
  Description of Artificial Sequence: Synthetic oligonucleotide
  5' Phos
gggaacattcggtcacattcggtc

SEQ ID NO: 2086 - DNA, 24 bp, Artificial Sequence
  Description of Artificial Sequence: Synthetic oligonucleotide
  5' Phos
gggatgatggcgtctgatggcgtc

SEQ ID NO: 2087 - DNA, 24 bp, Artificial Sequence
  Description of Artificial Sequence: Synthetic oligonucleotide
  5' Phos
gggagtatcgcgtcgtatcgcgtc

SEQ ID NO: 2088 - DNA, 24 bp, Artificial Sequence
  Description of Artificial Sequence: Synthetic oligonucleotide
  5' Phos
gggatcacagcgtctcacagcgtc

SEQ ID NO: 2089 - DNA, 24 bp, Artificial Sequence
  Description of Artificial Sequence: Synthetic oligonucleotide
  5' Phos
gggaaaggtccgtcaaggtccgtc

SEQ ID NO: 2090 - DNA, 24 bp, Artificial Sequence
  Description of Artificial Sequence: Synthetic oligonucleotide
  5' Phos
gggaagactccgtcagactccgtc

SEQ ID NO: 2091 - DNA, 24 bp, Artificial Sequence
  Description of Artificial Sequence: Synthetic oligonucleotide
  5' Phos
gggaggttgtgctcggttgtgctc

SEQ ID NO: 2092 - DNA, 24 bp, Artificial Sequence
  Description of Artificial Sequence: Synthetic oligonucleotide
  5' Phos
gggaggtcttcctcggtcttcctc

SEQ ID NO: 2093 - DNA, 24 bp, Artificial Sequence
  Description of Artificial Sequence: Synthetic oligonucleotide
  5' Phos
gggaatcgtgcctcatcgtgcctc

SEQ ID NO: 2094 - DNA, 24 bp, Artificial Sequence
  Description of Artificial Sequence: Synthetic oligonucleotide
  5' Phos
gggagcttcacctcgcttcacctc

SEQ ID NO: 2095 - DNA, 24 bp, Artificial Sequence
  Description of Artificial Sequence: Synthetic oligonucleotide
  5' Phos
gggaggtgtgactcggtgtgactc

SEQ ID NO: 2096 - DNA, 24 bp, Artificial Sequence
  Description of Artificial Sequence: Synthetic oligonucleotide
  5' Phos
gggagtctggactcgtctggactc

SEQ ID NO: 2097 - DNA, 24 bp, Artificial Sequence
  Description of Artificial Sequence: Synthetic oligonucleotide
  5' Phos
gggaacaggttatcacaggttatc

SEQ ID NO: 2098 - DNA, 24 bp, Artificial Sequence
  Description of Artificial Sequence: Synthetic oligonucleotide
  5' Phos
gggagccttggatcgccttggatc

SEQ ID NO: 2099 - DNA, 24 bp, Artificial Sequence
  Description of Artificial Sequence: Synthetic oligonucleotide
  5' Phos
gggatggctcgatctggctcgatc

SEQ ID NO: 2100 - DNA, 24 bp, Artificial Sequence
  Description of Artificial Sequence: Synthetic oligonucleotide
  5' Phos
gggagattgccatcgattgccatc

SEQ ID NO: 2101 - DNA, 24 bp, Artificial Sequence
  Description of Artificial Sequence: Synthetic oligonucleotide
  5' Phos
gggagttggtaatcgttggtaatc

SEQ ID NO: 2102 - DNA, 24 bp, Artificial Sequence
  Description of Artificial Sequence: Synthetic oligonucleotide
  5' Phos
gggaaagacgaatcaagacgaatc

SEQ ID NO: 2103 - DNA, 24 bp, Artificial Sequence
  Description of Artificial Sequence: Synthetic oligonucleotide
  5' Phos
gggatccaacaatctccaacaatc

SEQ ID NO: 2104 - DNA, 24 bp, Artificial Sequence
  Description of Artificial Sequence: Synthetic oligonucleotide
  5' Phos
gggatccgtgttgctccgtgttgc

SEQ ID NO: 2105 - DNA, 24 bp, Artificial Sequence
  Description of Artificial Sequence: Synthetic oligonucleotide
  5' Phos
gggagtaccattgcgtaccattgc

SEQ ID NO: 2106 - DNA, 24 bp, Artificial Sequence
  Description of Artificial Sequence: Synthetic oligonucleotide
  5' Phos
gggaaatgtggtgcaatgtggtgc

SEQ ID NO: 2107 - DNA, 24 bp, Artificial Sequence
  Description of Artificial Sequence: Synthetic oligonucleotide
  5' Phos
gggagccaatctgcgccaatctgc

SEQ ID NO: 2108 - DNA, 24 bp, Artificial Sequence
  Description of Artificial Sequence: Synthetic oligonucleotide
  5' Phos
gggagctatcctgcgctatcctgc

SEQ ID NO: 2109 - DNA, 24 bp, Artificial Sequence
  Description of Artificial Sequence: Synthetic oligonucleotide
  5' Phos
gggaggattaatgcggattaatgc

SEQ ID NO: 2110 - DNA, 24 bp, Artificial Sequence
  Description of Artificial Sequence: Synthetic oligonucleotide
  5' Phos
gggaagatggtggcagatggtggc

SEQ ID NO: 2111 - DNA, 24 bp, Artificial Sequence
  Description of Artificial Sequence: Synthetic oligonucleotide
  5' Phos
gggaggtatctggcggtatctggc

SEQ ID NO: 2112 - DNA, 24 bp, Artificial Sequence
  Description of Artificial Sequence: Synthetic oligonucleotide
  5' Phos
gggatatctatggctatctatggc

SEQ ID NO: 2113 - DNA, 24 bp, Artificial Sequence
  Description of Artificial Sequence: Synthetic oligonucleotide
  5' Phos
gttggtccaatggcgtccaatggc

SEQ ID NO: 2114 - DNA, 24 bp, Artificial Sequence
  Description of Artificial Sequence: Synthetic oligonucleotide
  5' Phos
gttgaggattcggcaggattcggc

SEQ ID NO: 2115 - DNA, 24 bp, Artificial Sequence
  Description of Artificial Sequence: Synthetic oligonucleotide
  5' Phos
gttgtagacacggctagacacggc

SEQ ID NO: 2116 - DNA, 24 bp, Artificial Sequence
  Description of Artificial Sequence: Synthetic oligonucleotide
  5' Phos
gttggagataaggcgagataaggc

SEQ ID NO: 2117 - DNA, 24 bp, Artificial Sequence
  Description of Artificial Sequence: Synthetic oligonucleotide
  5' Phos
gttgaagcgaaggcaagcgaaggc

SEQ ID NO: 2118 - DNA, 24 bp, Artificial Sequence
  Description of Artificial Sequence: Synthetic oligonucleotide
  5' Phos
gttgaccacttcgcaccacttcgc

SEQ ID NO: 2119 - DNA, 24 bp, Artificial Sequence
  Description of Artificial Sequence: Synthetic oligonucleotide
  5' Phos
gttgagatattcgcagatattcgc

SEQ ID NO: 2120 - DNA, 24 bp, Artificial Sequence
  Description of Artificial Sequence: Synthetic oligonucleotide
  5' Phos
gttggtatcagcgcgtatcagcgc

SEQ ID NO: 2121 - DNA, 24 bp, Artificial Sequence
  Description of Artificial Sequence: Synthetic oligonucleotide
  5' Phos
gttgagaagtccgcagaagtccgc

SEQ ID NO: 2122 - DNA, 24 bp, Artificial Sequence
  Description of Artificial Sequence: Synthetic oligonucleotide
  5' Phos
gttgacttatccgcacttatccgc

SEQ ID NO: 2123 - DNA, 24 bp, Artificial Sequence
  Description of Artificial Sequence: Synthetic oligonucleotide
  5' Phos
gttgaatggaccgcaatggaccgc

SEQ ID NO: 2124 - DNA, 24 bp, Artificial Sequence
  Description of Artificial Sequence: Synthetic oligonucleotide
  5' Phos
gttgttaactgagcttaactgagc

SEQ ID NO: 2125 - DNA, 24 bp, Artificial Sequence
  Description of Artificial Sequence: Synthetic oligonucleotide
  5' Phos
gttgtagaatgagctagaatgagc

SEQ ID NO: 2126 - DNA, 24 bp, Artificial Sequence
  Description of Artificial Sequence: Synthetic oligonucleotide
  5' Phos
gttggcttaggagcgcttaggagc

SEQ ID NO: 2127 - DNA, 24 bp, Artificial Sequence
  Description of Artificial Sequence: Synthetic oligonucleotide
  5' Phos
gttgtccttccagctccttccagc

SEQ ID NO: 2128 - DNA, 24 bp, Artificial Sequence
  Description of Artificial Sequence: Synthetic oligonucleotide
  5' Phos
gttgacattgttccacattgttcc

SEQ ID NO: 2129 - DNA, 24 bp, Artificial Sequence
  Description of Artificial Sequence: Synthetic oligonucleotide
  5' Phos
gttggagatgttccgagatgttcc

SEQ ID NO: 2130 - DNA, 24 bp, Artificial Sequence
  Description of Artificial Sequence: Synthetic oligonucleotide
  5' Phos
gttgtactggttcctactggttcc

SEQ ID NO: 2131 - DNA, 24 bp, Artificial Sequence
  Description of Artificial Sequence: Synthetic oligonucleotide
  5' Phos
gttgaagtcgttccaagtcgttcc

SEQ ID NO: 2132 - DNA, 24 bp, Artificial Sequence
  Description of Artificial Sequence: Synthetic oligonucleotide
  5' Phos
gttgatcatcttccatcatcttcc

SEQ ID NO: 2133 - DNA, 24 bp, Artificial Sequence
  Description of Artificial Sequence: Synthetic oligonucleotide
  5' Phos
gttggtctccttccgtctccttcc

SEQ ID NO: 2134 - DNA, 24 bp, Artificial Sequence
  Description of Artificial Sequence: Synthetic oligonucleotide
  5' Phos
gttgtaccacttcctaccacttcc

SEQ ID NO: 2135 - DNA, 24 bp, Artificial Sequence
  Description of Artificial Sequence: Synthetic oligonucleotide
  5' Phos
gttgacctgattccacctgattcc

SEQ ID NO: 2136 - DNA, 24 bp, Artificial Sequence
  Description of Artificial Sequence: Synthetic oligonucleotide
  5' Phos
gttgtacacattcctacacattcc

SEQ ID NO: 2137 - DNA, 24 bp, Artificial Sequence
  Description of Artificial Sequence: Synthetic oligonucleotide
  5' Phos
gttgtcctatctcctcctatctcc

SEQ ID NO: 2138 - DNA, 24 bp, Artificial Sequence
  Description of Artificial Sequence: Synthetic oligonucleotide
  5' Phos
gttgggattgctccggattgctcc

SEQ ID NO: 2139 - DNA, 24 bp, Artificial Sequence
  Description of Artificial Sequence: Synthetic oligonucleotide
  5' Phos
gttggatgtcctccgatgtcctcc

SEQ ID NO: 2140 - DNA, 24 bp, Artificial Sequence
  Description of Artificial Sequence: Synthetic oligonucleotide
  5' Phos
gttgggctattgccggctattgcc

SEQ ID NO: 2141 - DNA, 24 bp, Artificial Sequence
  Description of Artificial Sequence: Synthetic oligonucleotide
  5' Phos
gttgtccttctgcctccttctgcc

SEQ ID NO: 2142 - DNA, 24 bp, Artificial Sequence
  Description of Artificial Sequence: Synthetic oligonucleotide
  5' Phos
gttgtattcctgcctattcctgcc

SEQ ID NO: 2143 - DNA, 24 bp, Artificial Sequence
  Description of Artificial Sequence: Synthetic oligonucleotide
  5' Phos
gttgggtgtatgccggtgtatgcc

SEQ ID NO: 2144 - DNA, 24 bp, Artificial Sequence
  Description of Artificial Sequence: Synthetic oligonucleotide
  5' Phos
gttgtacaacggcctacaacggcc

SEQ ID NO: 2145 - DNA, 24 bp, Artificial Sequence
  Description of Artificial Sequence: Synthetic oligonucleotide
  5' Phos
gttgtaagcaggcctaagcaggcc

SEQ ID NO: 2146 - DNA, 24 bp, Artificial Sequence
  Description of Artificial Sequence: Synthetic oligonucleotide
  5' Phos
gttgttacctcgccttacctcgcc

SEQ ID NO: 2147 - DNA, 24 bp, Artificial Sequence
  Description of Artificial Sequence: Synthetic oligonucleotide
  5' Phos
gttgatgtcacgccatgtcacgcc

SEQ ID NO: 2148 - DNA, 24 bp, Artificial Sequence
  Description of Artificial Sequence: Synthetic oligonucleotide
  5' Phos
gttgtcttggagcctcttggagcc

SEQ ID NO: 2149 - DNA, 24 bp, Artificial Sequence
  Description of Artificial Sequence: Synthetic oligonucleotide
  5' Phos
gttgttgagcagccttgagcagcc

SEQ ID NO: 2150 - DNA, 24 bp, Artificial Sequence
  Description of Artificial Sequence: Synthetic oligonucleotide
  5' Phos
gttgaagcacagccaagcacagcc

SEQ ID NO: 2151 - DNA, 24 bp, Artificial Sequence
  Description of Artificial Sequence: Synthetic oligonucleotide
  5' Phos
gttggacagaagccgacagaagcc

SEQ ID NO: 2152 - DNA, 24 bp, Artificial Sequence
  Description of Artificial Sequence: Synthetic oligonucleotide
  5' Phos
gttgaagcgataccaagcgatacc

SEQ ID NO: 2153 - DNA, 24 bp, Artificial Sequence
  Description of Artificial Sequence: Synthetic oligonucleotide
  5' Phos
gttgtggaaggacctggaaggacc

SEQ ID NO: 2154 - DNA, 24 bp, Artificial Sequence
  Description of Artificial Sequence: Synthetic oligonucleotide
  5' Phos
gttgataaccgaccataaccgacc

SEQ ID NO: 2155 - DNA, 24 bp, Artificial Sequence
  Description of Artificial Sequence: Synthetic oligonucleotide
  5' Phos
gttgtcgtcagacctcgtcagacc

SEQ ID NO: 2156 - DNA, 24 bp, Artificial Sequence
  Description of Artificial Sequence: Synthetic oligonucleotide
  5' Phos
gttgagtggtcaccagtggtcacc

SEQ ID NO: 2157 - DNA, 24 bp, Artificial Sequence
  Description of Artificial Sequence: Synthetic oligonucleotide
  5' Phos
gttgtggactcacctggactcacc

SEQ ID NO: 2158 - DNA, 24 bp, Artificial Sequence
  Description of Artificial Sequence: Synthetic oligonucleotide
  5' Phos
gttgattcgccaccattcgccacc

SEQ ID NO: 2159 - DNA, 24 bp, Artificial Sequence
  Description of Artificial Sequence: Synthetic oligonucleotide
  5' Phos
gttggatatacaccgatatacacc

SEQ ID NO: 2160 - DNA, 24 bp, Artificial Sequence
  Description of Artificial Sequence: Synthetic oligonucleotide
  5' Phos
gttgttaaggaaccttaaggaacc

SEQ ID NO: 2161 - DNA, 24 bp, Artificial Sequence
  Description of Artificial Sequence: Synthetic oligonucleotide
  5' Phos
gttgttgtagaaccttgtagaacc

SEQ ID NO: 2162 - DNA, 24 bp, Artificial Sequence
  Description of Artificial Sequence: Synthetic oligonucleotide
  5' Phos
gttgaacgccaaccaacgccaacc

SEQ ID NO: 2163 - DNA, 24 bp, Artificial Sequence
  Description of Artificial Sequence: Synthetic oligonucleotide
  5' Phos
gttgagcgtgttacagcgtgttac

SEQ ID NO: 2164 - DNA, 24 bp, Artificial Sequence
  Description of Artificial Sequence: Synthetic oligonucleotide
  5' Phos
gttggtcgctctacgtcgctctac

SEQ ID NO: 2165 - DNA, 24 bp, Artificial Sequence
  Description of Artificial Sequence: Synthetic oligonucleotide
  5' Phos
gttggagcagctacgagcagctac

SEQ ID NO: 2166 - DNA, 24 bp, Artificial Sequence
  Description of Artificial Sequence: Synthetic oligonucleotide
  5' Phos
gttgatccacctacatccacctac

SEQ ID NO: 2167 - DNA, 24 bp, Artificial Sequence
  Description of Artificial Sequence: Synthetic oligonucleotide
  5' Phos
gttgggctgactacggctgactac

SEQ ID NO: 2168 - DNA, 24 bp, Artificial Sequence
  Description of Artificial Sequence: Synthetic oligonucleotide
  5' Phos
gttggtggaaggacgtggaaggac

SEQ ID NO: 2169 - DNA, 24 bp, Artificial Sequence
  Description of Artificial Sequence: Synthetic oligonucleotide
  5' Phos
gttgactgctcgacactgctcgac

SEQ ID NO: 2170 - DNA, 24 bp, Artificial Sequence
  Description of Artificial Sequence: Synthetic oligonucleotide
  5' Phos
gttgtctgtgcgactctgtgcgac

SEQ ID NO: 2171 - DNA, 24 bp, Artificial Sequence
  Description of Artificial Sequence: Synthetic oligonucleotide
  5' Phos
gttggaagtgcgacgaagtgcgac

SEQ ID NO: 2172 - DNA, 24 bp, Artificial Sequence
  Description of Artificial Sequence: Synthetic oligonucleotide
  5' Phos
gttgaccaccagacaccaccagac

SEQ ID NO: 2173 - DNA, 24 bp, Artificial Sequence
  Description of Artificial Sequence: Synthetic oligonucleotide
  5' Phos
gttgaacagttcacaacagttcac

SEQ ID NO: 2174 - DNA, 24 bp, Artificial Sequence
  Description of Artificial Sequence: Synthetic oligonucleotide
  5' Phos
gttgaggatggcacaggatggcac

SEQ ID NO: 2175 - DNA, 24 bp, Artificial Sequence
  Description of Artificial Sequence: Synthetic oligonucleotide
  5' Phos
gttggttcacgcacgttcacgcac

SEQ ID NO: 2176 - DNA, 24 bp, Artificial Sequence
  Description of Artificial Sequence: Synthetic oligonucleotide
  5' Phos
gttgacatctccacacatctccac

SEQ ID NO: 2177 - DNA, 24 bp, Artificial Sequence
  Description of Artificial Sequence: Synthetic oligonucleotide
  5' Phos
gttggttgcaccacgttgcaccac

SEQ ID NO: 2178 - DNA, 24 bp, Artificial Sequence
  Description of Artificial Sequence: Synthetic oligonucleotide
  5' Phos
gttgttaacgacacttaacgacac

SEQ ID NO: 2179 - DNA, 24 bp, Artificial Sequence
  Description of Artificial Sequence: Synthetic oligonucleotide
  5' Phos
gttgattgagacacattgagacac

SEQ ID NO: 2180 - DNA, 24 bp, Artificial Sequence
  Description of Artificial Sequence: Synthetic oligonucleotide
  5' Phos
gttggtcatcacacgtcatcacac

SEQ ID NO: 2181 - DNA, 24 bp, Artificial Sequence
  Description of Artificial Sequence: Synthetic oligonucleotide
  5' Phos
gttggcgatctaacgcgatctaac

SEQ ID NO: 2182 - DNA, 24 bp, Artificial Sequence
  Description of Artificial Sequence: Synthetic oligonucleotide
  5' Phos
gttgtatcggcttatatcggctta

SEQ ID NO: 2183 - DNA, 24 bp, Artificial Sequence
  Description of Artificial Sequence: Synthetic oligonucleotide
  5' Phos
gttgggtgtccttaggtgtcctta

SEQ ID NO: 2184 - DNA, 24 bp, Artificial Sequence
  Description of Artificial Sequence: Synthetic oligonucleotide
  5' Phos
gttgcttggccttacttggcctta

SEQ ID NO: 2185 - DNA, 24 bp, Artificial Sequence
  Description of Artificial Sequence: Synthetic oligonucleotide
  5' Phos
gttgctcgctattactcgctatta

SEQ ID NO: 2186 - DNA, 24 bp, Artificial Sequence
  Description of Artificial Sequence: Synthetic oligonucleotide
  5' Phos
gttgccggccattaccggccatta

SEQ ID NO: 2187 - DNA, 24 bp, Artificial Sequence
  Description of Artificial Sequence: Synthetic oligonucleotide
  5' Phos
gttgtccaatggtatccaatggta

SEQ ID NO: 2188 - DNA, 24 bp, Artificial Sequence
  Description of Artificial Sequence: Synthetic oligonucleotide
  5' Phos
gttgggtggtcgtaggtggtcgta

SEQ ID NO: 2189 - DNA, 24 bp, Artificial Sequence
  Description of Artificial Sequence: Synthetic oligonucleotide
  5' Phos
gttgtaaggtcgtataaggtcgta

SEQ ID NO: 2190 - DNA, 24 bp, Artificial Sequence
  Description of Artificial Sequence: Synthetic oligonucleotide
  5' Phos
gttggaatcacgtagaatcacgta

SEQ ID NO: 2191 - DNA, 24 bp, Artificial Sequence
  Description of Artificial Sequence: Synthetic oligonucleotide
  5' Phos
gttgctgactagtactgactagta

SEQ ID NO: 2192 - DNA, 24 bp, Artificial Sequence
  Description of Artificial Sequence: Synthetic oligonucleotide
  5' Phos
gttgcttgtcagtacttgtcagta

SEQ ID NO: 2193 - DNA, 24 bp, Artificial Sequence
  Description of Artificial Sequence: Synthetic oligonucleotide
  5' Phos
gttggccagcagtagccagcagta

SEQ ID NO: 2194 - DNA, 24 bp, Artificial Sequence
  Description of Artificial Sequence: Synthetic oligonucleotide
  5' Phos
gttgttacggtctattacggtcta

SEQ ID NO: 2195 - DNA, 24 bp, Artificial Sequence
  Description of Artificial Sequence: Synthetic oligonucleotide
  5' Phos
gttgtcttcgtctatcttcgtcta

SEQ ID NO: 2196 - DNA, 24 bp, Artificial Sequence
  Description of Artificial Sequence: Synthetic oligonucleotide
  5' Phos
gttgggctaggctaggctaggcta

SEQ ID NO: 2197 - DNA, 24 bp, Artificial Sequence
  Description of Artificial Sequence: Synthetic oligonucleotide
  5' Phos
gttggaattcgctagaattcgcta

SEQ ID NO: 2198 - DNA, 24 bp, Artificial Sequence
  Description of Artificial Sequence: Synthetic oligonucleotide
  5' Phos
gttggtggcagctagtggcagcta

SEQ ID NO: 2199 - DNA, 24 bp, Artificial Sequence
  Description of Artificial Sequence: Synthetic oligonucleotide
  5' Phos
gttgtgcctacctatgcctaccta

SEQ ID NO: 2200 - DNA, 24 bp, Artificial Sequence
  Description of Artificial Sequence: Synthetic oligonucleotide
  5' Phos
gttggtaacgactagtaacgacta

SEQ ID NO: 2201 - DNA, 24 bp, Artificial Sequence
  Description of Artificial Sequence: Synthetic oligonucleotide
  5' Phos
gttgcttcgcactacttcgcacta

SEQ ID NO: 2202 - DNA, 24 bp, Artificial Sequence
  Description of Artificial Sequence: Synthetic oligonucleotide
  5' Phos
gttggcgtccactagcgtccacta

SEQ ID NO: 2203 - DNA, 24 bp, Artificial Sequence
  Description of Artificial Sequence: Synthetic oligonucleotide
  5' Phos
gttgcaccgttatacaccgttata

SEQ ID NO: 2204 - DNA, 24 bp, Artificial Sequence
  Description of Artificial Sequence: Synthetic oligonucleotide
  5' Phos
gttgcggttctatacggttctata

SEQ ID NO: 2205 - DNA, 24 bp, Artificial Sequence
  Description of Artificial Sequence: Synthetic oligonucleotide
  5' Phos
gttgccttcggataccttcggata

SEQ ID NO: 2206 - DNA, 24 bp, Artificial Sequence
  Description of Artificial Sequence: Synthetic oligonucleotide
  5' Phos
gttgggctccgataggctccgata

SEQ ID NO: 2207 - DNA, 24 bp, Artificial Sequence
  Description of Artificial Sequence: Synthetic oligonucleotide
  5' Phos
gttgcaggccgatacaggccgata

SEQ ID NO: 2208 - DNA, 24 bp, Artificial Sequence
  Description of Artificial Sequence: Synthetic oligonucleotide
  5' Phos
gttggccgacgatagccgacgata

SEQ ID NO: 2209 - DNA, 24 bp, Artificial Sequence
  Description of Artificial Sequence: Synthetic oligonucleotide
  5' Phos
gttggtggcgcatagtggcgcata

SEQ ID NO: 2210 - DNA, 24 bp, Artificial Sequence
  Description of Artificial Sequence: Synthetic oligonucleotide
  5' Phos
gttggacggccatagacggccata

SEQ ID NO: 2211 - DNA, 24 bp, Artificial Sequence
  Description of Artificial Sequence: Synthetic oligonucleotide
  5' Phos
gttgcggaagaatacggaagaata

SEQ ID NO: 2212 - DNA, 24 bp, Artificial Sequence
  Description of Artificial Sequence: Synthetic oligonucleotide
  5' Phos
gttgcgttgcttgacgttgcttga

SEQ ID NO: 2213 - DNA, 24 bp, Artificial Sequence
  Description of Artificial Sequence: Synthetic oligonucleotide
  5' Phos
gttggactgcttgagactgcttga

SEQ ID NO: 2214 - DNA, 24 bp, Artificial Sequence
  Description of Artificial Sequence: Synthetic oligonucleotide
  5' Phos
gttgtcggacttgatcggacttga

SEQ ID NO: 2215 - DNA, 24 bp, Artificial Sequence
  Description of Artificial Sequence: Synthetic oligonucleotide
  5' Phos
gttgtctcgattgatctcgattga

SEQ ID NO: 2216 - DNA, 24 bp, Artificial Sequence
  Description of Artificial Sequence: Synthetic oligonucleotide
  5' Phos
gttgtcgacattgatcgacattga

SEQ ID NO: 2217 - DNA, 24 bp, Artificial Sequence
  Description of Artificial Sequence: Synthetic oligonucleotide
  5' Phos
gttggcctcagtgagcctcagtga

SEQ ID NO: 2218 - DNA, 24 bp, Artificial Sequence
  Description of Artificial Sequence: Synthetic oligonucleotide
  5' Phos
gttggtctcgctgagtctcgctga

SEQ ID NO: 2219 - DNA, 24 bp, Artificial Sequence
  Description of Artificial Sequence: Synthetic oligonucleotide
  5' Phos
gttgttcctcctgattcctcctga

SEQ ID NO: 2220 - DNA, 24 bp, Artificial Sequence
  Description of Artificial Sequence: Synthetic oligonucleotide
  5' Phos
gttgctgtgcctgactgtgcctga

SEQ ID NO: 2221 - DNA, 24 bp, Artificial Sequence
  Description of Artificial Sequence: Synthetic oligonucleotide
  5' Phos
gttgggaagcctgaggaagcctga

SEQ ID NO: 2222 - DNA, 24 bp, Artificial Sequence
  Description of Artificial Sequence: Synthetic oligonucleotide
  5' Phos
gttgcgagtgtggacgagtgtgga

SEQ ID NO: 2223 - DNA, 24 bp, Artificial Sequence
  Description of Artificial Sequence: Synthetic oligonucleotide
  5' Phos
gttgtcgctgtggatcgctgtgga

SEQ ID NO: 2224 - DNA, 24 bp, Artificial Sequence
  Description of Artificial Sequence: Synthetic oligonucleotide
  5' Phos
gttgtgcagctggatgcagctgga

SEQ ID NO: 2225 - DNA, 24 bp, Artificial Sequence
  Description of Artificial Sequence: Synthetic oligonucleotide
  5' Phos
gttgggattatggaggattatgga

SEQ ID NO: 2226 - DNA, 24 bp, Artificial Sequence
  Description of Artificial Sequence: Synthetic oligonucleotide
  5' Phos
gttgttggtccggattggtccgga

SEQ ID NO: 2227 - DNA, 24 bp, Artificial Sequence
  Description of Artificial Sequence: Synthetic oligonucleotide
  5' Phos
gttgccgttacggaccgttacgga

SEQ ID NO: 2228 - DNA, 24 bp, Artificial Sequence
  Description of Artificial Sequence: Synthetic oligonucleotide
  5' Phos
gttggacctacggagacctacgga

SEQ ID NO: 2229 - DNA, 24 bp, Artificial Sequence
  Description of Artificial Sequence: Synthetic oligonucleotide
  5' Phos
gttgcttggacggacttggacgga

SEQ ID NO: 2230 - DNA, 24 bp, Artificial Sequence
  Description of Artificial Sequence: Synthetic oligonucleotide
  5' Phos
gttgcggttcaggacggttcagga

SEQ ID NO: 2231 - DNA, 24 bp, Artificial Sequence
  Description of Artificial Sequence: Synthetic oligonucleotide
  5' Phos
gttgcatgccaggacatgccagga

SEQ ID NO: 2232 - DNA, 24 bp, Artificial Sequence
  Description of Artificial Sequence: Synthetic oligonucleotide
  5' Phos
gttgtgtagcgcgatgtagcgcga

SEQ ID NO: 2233 - DNA, 24 bp, Artificial Sequence
  Description of Artificial Sequence: Synthetic oligonucleotide
  5' Phos
gttgtggtaaccgatggtaaccga

SEQ ID NO: 2234 - DNA, 24 bp, Artificial Sequence
  Description of Artificial Sequence: Synthetic oligonucleotide
  5' Phos
gttgtgacggacgatgacggacga

SEQ ID NO: 2235 - DNA, 24 bp, Artificial Sequence
  Description of Artificial Sequence: Synthetic oligonucleotide
  5' Phos
gttgctgaggacgactgaggacga

SEQ ID NO: 2236 - DNA, 24 bp, Artificial Sequence
  Description of Artificial Sequence: Synthetic oligonucleotide
  5' Phos
gttggagcggtagagagcggtaga

SEQ ID NO: 2237 - DNA, 24 bp, Artificial Sequence
  Description of Artificial Sequence: Synthetic oligonucleotide
  5' Phos
gttgccgagctagaccgagctaga

SEQ ID NO: 2238 - DNA, 24 bp, Artificial Sequence
  Description of Artificial Sequence: Synthetic oligonucleotide
  5' Phos
gttgtcagccgagatcagccgaga

SEQ ID NO: 2239 - DNA, 24 bp, Artificial Sequence
  Description of Artificial Sequence: Synthetic oligonucleotide
  5' Phos
gttgctgaccgagactgaccgaga

SEQ ID NO: 2240 - DNA, 24 bp, Artificial Sequence
  Description of Artificial Sequence: Synthetic oligonucleotide
  5' Phos
gttggatctagagagatctagaga

SEQ ID NO: 2241 - DNA, 24 bp, Artificial Sequence
  Description of Artificial Sequence: Synthetic oligonucleotide
  5' Phos
gttgtgcggtcagatgcggtcaga

SEQ ID NO: 2242 - DNA, 24 bp, Artificial Sequence
  Description of Artificial Sequence: Synthetic oligonucleotide
  5' Phos
gttgtctgtccagatctgtccaga

SEQ ID NO: 2243 - DNA, 24 bp, Artificial Sequence
  Description of Artificial Sequence: Synthetic oligonucleotide
  5' Phos
gttgcttatccagacttatccaga

SEQ ID NO: 2244 - DNA, 24 bp, Artificial Sequence
  Description of Artificial Sequence: Synthetic oligonucleotide
  5' Phos
gttgggccgtaagaggccgtaaga

SEQ ID NO: 2245 - DNA, 24 bp, Artificial Sequence
  Description of Artificial Sequence: Synthetic oligonucleotide
  5' Phos
gttggtatgcaagagtatgcaaga

SEQ ID NO: 2246 - DNA, 24 bp, Artificial Sequence
  Description of Artificial Sequence: Synthetic oligonucleotide
  5' Phos
gttgtccaagttcatccaagttca

SEQ ID NO: 2247 - DNA, 24 bp, Artificial Sequence
  Description of Artificial Sequence: Synthetic oligonucleotide
  5' Phos
gttgcgctgtgtcacgctgtgtca

SEQ ID NO: 2248 - DNA, 24 bp, Artificial Sequence
  Description of Artificial Sequence: Synthetic oligonucleotide
  5' Phos
gttgggacctgtcaggacctgtca

SEQ ID NO: 2249 - DNA, 24 bp, Artificial Sequence
  Description of Artificial Sequence: Synthetic oligonucleotide
  5' Phos
gttgcggaaggtcacggaaggtca

SEQ ID NO: 2250 - DNA, 24 bp, Artificial Sequence
  Description of Artificial Sequence: Synthetic oligonucleotide
  5' Phos
gttgtccgacgtcatccgacgtca

SEQ ID NO: 2251 - DNA, 24 bp, Artificial Sequence
  Description of Artificial Sequence: Synthetic oligonucleotide
  5' Phos
gttggagatagtcagagatagtca

SEQ ID NO: 2252 - DNA, 24 bp, Artificial Sequence
  Description of Artificial Sequence: Synthetic oligonucleotide
  5' Phos
gttgcctggagtcacctggagtca

SEQ ID NO: 2253 - DNA, 24 bp, Artificial Sequence
  Description of Artificial Sequence: Synthetic oligonucleotide
  5' Phos
gttgcctgctctcacctgctctca

SEQ ID NO: 2254 - DNA, 24 bp, Artificial Sequence
  Description of Artificial Sequence: Synthetic oligonucleotide
  5' Phos
gttgtggaggctcatggaggctca

SEQ ID NO: 2255 - DNA, 24 bp, Artificial Sequence
  Description of Artificial Sequence: Synthetic oligonucleotide
  5' Phos
gttgtccatactcatccatactca

SEQ ID NO: 2256 - DNA, 24 bp, Artificial Sequence
  Description of Artificial Sequence: Synthetic oligonucleotide
  5' Phos
gttggtatgttgcagtatgttgca

SEQ ID NO: 2257 - DNA, 24 bp, Artificial Sequence
  Description of Artificial Sequence: Synthetic oligonucleotide
  5' Phos
gttgctacagcgcactacagcgca

SEQ ID NO: 2258 - DNA, 24 bp, Artificial Sequence
  Description of Artificial Sequence: Synthetic oligonucleotide
  5' Phos
gttgccggttagcaccggttagca

SEQ ID NO: 2259 - DNA, 24 bp, Artificial Sequence
  Description of Artificial Sequence: Synthetic oligonucleotide
  5' Phos
gttgcagtggagcacagtggagca

SEQ ID NO: 2260 - DNA, 24 bp, Artificial Sequence
  Description of Artificial Sequence: Synthetic oligonucleotide
  5' Phos
gttggctccttccagctccttcca

SEQ ID NO: 2261 - DNA, 24 bp, Artificial Sequence
  Description of Artificial Sequence: Synthetic oligonucleotide
  5' Phos
gttggtcactgccagtcactgcca

SEQ ID NO: 2262 - DNA, 24 bp, Artificial Sequence
  Description of Artificial Sequence: Synthetic oligonucleotide
  5' Phos
gttggctgatgccagctgatgcca

SEQ ID NO: 2263 - DNA, 24 bp, Artificial Sequence
  Description of Artificial Sequence: Synthetic oligonucleotide
  5' Phos
gttgtataaggccatataaggcca

SEQ ID NO: 2264 - DNA, 24 bp, Artificial Sequence
  Description of Artificial Sequence: Synthetic oligonucleotide
  5' Phos
gttgtgcttcgccatgcttcgcca

SEQ ID NO: 2265 - DNA, 24 bp, Artificial Sequence
  Description of Artificial Sequence: Synthetic oligonucleotide
  5' Phos
gttgtcttaagccatcttaagcca

SEQ ID NO: 2266 - DNA, 24 bp, Artificial Sequence
  Description of Artificial Sequence: Synthetic oligonucleotide
  5' Phos
gttggagctgaccagagctgacca

SEQ ID NO: 2267 - DNA, 24 bp, Artificial Sequence
  Description of Artificial Sequence: Synthetic oligonucleotide
  5' Phos
gttggttggaaccagttggaacca

SEQ ID NO: 2268 - DNA, 24 bp, Artificial Sequence
  Description of Artificial Sequence: Synthetic oligonucleotide
  5' Phos
gttgttaccaaccattaccaacca

SEQ ID NO: 2269 - DNA, 24 bp, Artificial Sequence
  Description of Artificial Sequence: Synthetic oligonucleotide
  5' Phos
gttgtgcgcgtacatgcgcgtaca

SEQ ID NO: 2270 - DNA, 24 bp, Artificial Sequence
  Description of Artificial Sequence: Synthetic oligonucleotide
  5' Phos
gttgccagcgtacaccagcgtaca

SEQ ID NO: 2271 - DNA, 24 bp, Artificial Sequence
  Description of Artificial Sequence: Synthetic oligonucleotide
  5' Phos
gttgcaatgctacacaatgctaca

SEQ ID NO: 2272 - DNA, 24 bp, Artificial Sequence
  Description of Artificial Sequence: Synthetic oligonucleotide
  5' Phos
gttgcggcactacacggcactaca

SEQ ID NO: 2273 - DNA, 24 bp, Artificial Sequence
  Description of Artificial Sequence: Synthetic oligonucleotide
  5' Phos
gttgcagattcacacagattcaca

SEQ ID NO: 2274 - DNA, 24 bp, Artificial Sequence
  Description of Artificial Sequence: Synthetic oligonucleotide
  5' Phos
gttgccacggaacaccacggaaca

SEQ ID NO: 2275 - DNA, 24 bp, Artificial Sequence
  Description of Artificial Sequence: Synthetic oligonucleotide
  5' Phos
gttgcacgcgctaacacgcgctaa

SEQ ID NO: 2276 - DNA, 24 bp, Artificial Sequence
  Description of Artificial Sequence: Synthetic oligonucleotide
  5' Phos
gttggtccaactaagtccaactaa

SEQ ID NO: 2277 - DNA, 24 bp, Artificial Sequence
  Description of Artificial Sequence: Synthetic oligonucleotide
  5' Phos
gttggaagttggaagaagttggaa

SEQ ID NO: 2278 - DNA, 24 bp, Artificial Sequence
  Description of Artificial Sequence: Synthetic oligonucleotide
  5' Phos
gttgcctgacggaacctgacggaa

SEQ ID NO: 2279 - DNA, 24 bp, Artificial Sequence
  Description of Artificial Sequence: Synthetic oligonucleotide
  5' Phos
gttgcggtgaggaacggtgaggaa

SEQ ID NO: 2280 - DNA, 24 bp, Artificial Sequence
  Description of Artificial Sequence: Synthetic oligonucleotide
  5' Phos
gttggtcggaggaagtcggaggaa

SEQ ID NO: 2281 - DNA, 24 bp, Artificial Sequence
  Description of Artificial Sequence: Synthetic oligonucleotide
  5' Phos
gttgccaggtcgaaccaggtcgaa

SEQ ID NO: 2282 - DNA, 24 bp, Artificial Sequence
  Description of Artificial Sequence: Synthetic oligonucleotide
  5' Phos
gttgtccacgcgaatccacgcgaa

SEQ ID NO: 2283 - DNA, 24 bp, Artificial Sequence
  Description of Artificial Sequence: Synthetic oligonucleotide
  5' Phos
gttgcgcttccgaacgcttccgaa

SEQ ID NO: 2284 - DNA, 24 bp, Artificial Sequence
  Description of Artificial Sequence: Synthetic oligonucleotide
  5' Phos
gttgcaatcgagaacaatcgagaa

SEQ ID NO: 2285 - DNA, 24 bp, Artificial Sequence
  Description of Artificial Sequence: Synthetic oligonucleotide
  5' Phos
gttgctagagagaactagagagaa

SEQ ID NO: 2286 - DNA, 24 bp, Artificial Sequence
  Description of Artificial Sequence: Synthetic oligonucleotide
  5' Phos
gttgcgcgcaagaacgcgcaagaa

SEQ ID NO: 2287 - DNA, 24 bp, Artificial Sequence
  Description of Artificial Sequence: Synthetic oligonucleotide
  5' Phos
gttgccgacctcaaccgacctcaa

SEQ ID NO: 2288 - DNA, 24 bp, Artificial Sequence
  Description of Artificial Sequence: Synthetic oligonucleotide
  5' Phos
gttggcgtgtgcaagcgtgtgcaa

SEQ ID NO: 2289 - DNA, 24 bp, Artificial Sequence
  Description of Artificial Sequence: Synthetic oligonucleotide
  5' Phos
gttgcagagcgcaacagagcgcaa

SEQ ID NO: 2290 - DNA, 24 bp, Artificial Sequence
  Description of Artificial Sequence: Synthetic oligonucleotide
  5' Phos
gttggctgcagcaagctgcagcaa

SEQ ID NO: 2291 - DNA, 24 bp, Artificial Sequence
  Description of Artificial Sequence: Synthetic oligonucleotide
  5' Phos
gttgcagacgccaacagacgccaa

SEQ ID NO: 2292 - DNA, 24 bp, Artificial Sequence
  Description of Artificial Sequence: Synthetic oligonucleotide
  5' Phos
gttggaaggaccaagaaggaccaa

SEQ ID NO: 2293 - DNA, 24 bp, Artificial Sequence
  Description of Artificial Sequence: Synthetic oligonucleotide
  5' Phos
gttgctctcgacaactctcgacaa

SEQ ID NO: 2294 - DNA, 24 bp, Artificial Sequence
  Description of Artificial Sequence: Synthetic oligonucleotide
  5' Phos
gttggtacagacaagtacagacaa

SEQ ID NO: 2295 - DNA, 24 bp, Artificial Sequence
  Description of Artificial Sequence: Synthetic oligonucleotide
  5' Phos
gttggagagaacaagagagaacaa

SEQ ID NO: 2296 - DNA, 24 bp, Artificial Sequence
  Description of Artificial Sequence: Synthetic oligonucleotide
  5' Phos
gttgaacgtgtgttaacgtgtgtt

SEQ ID NO: 2297 - DNA, 24 bp, Artificial Sequence
  Description of Artificial Sequence: Synthetic oligonucleotide
  5' Phos
gttgactcgatgttactcgatgtt

SEQ ID NO: 2298 - DNA, 24 bp, Artificial Sequence
  Description of Artificial Sequence: Synthetic oligonucleotide
  5' Phos
gttggtcctcggttgtcctcggtt

SEQ ID NO: 2299 - DNA, 24 bp, Artificial Sequence
  Description of Artificial Sequence: Synthetic oligonucleotide
  5' Phos
gttgctactaggttctactaggtt

SEQ ID NO: 2300 - DNA, 24 bp, Artificial Sequence
  Description of Artificial Sequence: Synthetic oligonucleotide
  5' Phos
gttgagtatgcgttagtatgcgtt

SEQ ID NO: 2301 - DNA, 24 bp, Artificial Sequence
  Description of Artificial Sequence: Synthetic oligonucleotide
  5' Phos
gttggaggttagttgaggttagtt

SEQ ID NO: 2302 - DNA, 24 bp, Artificial Sequence
  Description of Artificial Sequence: Synthetic oligonucleotide
  5' Phos
gttgctccttagttctccttagtt

SEQ ID NO: 2303 - DNA, 24 bp, Artificial Sequence
  Description of Artificial Sequence: Synthetic oligonucleotide
  5' Phos
gttgagaacgagttagaacgagtt

SEQ ID NO: 2304 - DNA, 24 bp, Artificial Sequence
  Description of Artificial Sequence: Synthetic oligonucleotide
  5' Phos
gttgagcggcagttagcggcagtt

SEQ ID NO: 2305 - DNA, 254 bp, Artificial Sequence
  Description of Artificial Sequence: Synthetic polynucleotide
  modified_base (5)..(24): a, c, t, g, unknown or other
  modified_base (29)..(48): a, c, t, g, unknown or other
  modified_base (53)..(72): a, c, t, g, unknown or other
  modified_base (77)..(96): a, c, t, g, unknown or other
  misc_feature (127)..(128): Nucleotides at these positions are non-consecutive and are separated by a non-disclosed gDNA sequence
  modified_base (159)..(178): a, c, t, g, unknown or other
  modified_base (183)..(202): a, c, t, g, unknown or other
  modified_base (207)..(226): a, c, t, g, unknown or other
  modified_base (231)..(250): a, c, t, g, unknown or other
gttgnnnnnnnnnnnnnnnnnnnngggannnnnnnnnnnnnnnnnnnngtcannnnnnnnnnnnnnnnnnnncgaannnnnnnnnnnnnnnnnnnntctgcgctaagtccatcctatctacatccgtacggatgtagataggatggacttagcgcagannnnnnnnnnnnnnnnnnnnttcgnnnnnnnnnnnnnnnnnnnntgacnnnnnnnnnnnnnnnnnnnntcccnnnnnnnnnnnnnnnnnnnncaac

SEQ ID NO: 2306 - DNA, 24 bp, Artificial Sequence
  Description of Artificial Sequence: Synthetic oligonucleotide
  modified_base (5)..(24): a, c, t, g, unknown or other
gttgnnnnnnnnnnnnnnnnnnnn

SEQ ID NO: 2307 - DNA, 24 bp, Artificial Sequence
  Description of Artificial Sequence: Synthetic oligonucleotide
  modified_base (5)..(24): a, c, t, g, unknown or other
gggannnnnnnnnnnnnnnnnnnn

SEQ ID NO: 2308 - DNA, 24 bp, Artificial Sequence
  Description of Artificial Sequence: Synthetic oligonucleotide
  modified_base (5)..(24): a, c, t, g, unknown or other
gtcannnnnnnnnnnnnnnnnnnn

SEQ ID NO: 2309 - DNA, 24 bp, Artificial Sequence
  Description of Artificial Sequence: Synthetic oligonucleotide
  modified_base (5)..(24): a, c, t, g, unknown or other
cgaannnnnnnnnnnnnnnnnnnn

SEQ ID NO: 2310 - DNA, 31 bp, Artificial Sequence
  Description of Artificial Sequence: Synthetic oligonucleotide
  modified_base (5)..(30): a, c, t, g, unknown or other
tctgnnnnnnnnnnnnnnnnnnnnnnnnnnt

SEQ ID NO: 2311 - DNA, 24 bp, Artificial Sequence
  Description of Artificial Sequence: Synthetic oligonucleotide
  modified_base (5)..(24): a, c, t, g, unknown or other
tcccnnnnnnnnnnnnnnnnnnnn

SEQ ID NO: 2312 - DNA, 24 bp, Artificial Sequence
  Description of Artificial Sequence: Synthetic oligonucleotide
  modified_base (5)..(24): a, c, t, g, unknown or other
tgacnnnnnnnnnnnnnnnnnnnn

SEQ ID NO: 2313 - DNA, 24 bp, Artificial Sequence
  Description of Artificial Sequence: Synthetic oligonucleotide
  modified_base (5)..(24): a, c, t, g, unknown or other
ttcgnnnnnnnnnnnnnnnnnnnn

SEQ ID NO: 2314 - DNA, 24 bp, Artificial Sequence
  Description of Artificial Sequence: Synthetic oligonucleotide
  modified_base (5)..(24): a, c, t, g, unknown or other
cagannnnnnnnnnnnnnnnnnnn

SEQ ID NO: 2315 - DNA, 66 bp, Artificial Sequence
  Description of Artificial Sequence: Synthetic oligonucleotide
cgattgaggccggtaatacgactcactatagggacactctttccctacacgacgctcttccgatct

SEQ ID NO: 2316 - DNA, 70 bp, Artificial Sequence
  Description of Artificial Sequence: Synthetic oligonucleotide
caacagatcggaagagcgtcgtgtagggaaagagtgtccctatagtgagtcgtattaccggcctcaatcg

SEQ ID NO: 2317 - DNA, 200 bp, Artificial Sequence
  Description of Artificial Sequence: Synthetic polynucleotide
  modified_base (5)..(24): a, c, t, g, unknown or other
  modified_base (29)..(48): a, c, t, g, unknown or other
  modified_base (53)..(72): a, c, t, g, unknown or other
  modified_base (77)..(96): a, c, t, g, unknown or other
  misc_feature (100)..(101): Nucleotides at these positions are non-consecutive and are separated by a non-disclosed capped gDNA sequence
  modified_base (105)..(124): a, c, t, g, unknown or other
  modified_base (129)..(149): a, c, t, g, unknown or other
  modified_base (153)..(172): a, c, t, g, unknown or other
  modified_base (175)..(196): a, c, t, g, unknown or other
caacnnnnnnnnnnnnnnnnnnnngggannnnnnnnnnnnnnnnnnnngtcannnnnnnnnnnnnnnnnnnncgaannnnnnnnnnnnnnnnnnnntctgcagannnnnnnnnnnnnnnnnnnnttcgnnnnnnnnnnnnnnnnnnnntgacnnnnnnnnnnnnnnnnnnnntcccnnnnnnnnnnnnnnnnnnnncaac

SEQ ID NO: 2318 - DNA, 40 bp, Artificial Sequence
  Description of Artificial Sequence: Synthetic oligonucleotide
  modified_base (35)..(40): a, c, t, g, unknown or other
gtgactggagttcagacgtgtgctcttccgatctnnnnnn

SEQ ID NO: 2319 - DNA, 58 bp, Artificial Sequence
  Description of Artificial Sequence: Synthetic oligonucleotide
aatgatacggcgaccaccgagatctacactctttccctacacgacgctcttccgatct

SEQ ID NO: 2320 - DNA, 66 bp, Artificial Sequence
  Description of Artificial Sequence: Synthetic oligonucleotide
caagcagaagacggcatacgagatcctggtaggtgactggagttcagacgtgtgctcttccgatct

SEQ ID NO: 2321 - DNA, 33 bp, Artificial Sequence
  Description of Artificial Sequence: Synthetic oligonucleotide
acactctttccctacacgacgctcttccgatct

SEQ ID NO: 2322 - DNA, 67 bp, Artificial Sequence
  Description of Artificial Sequence: Synthetic oligonucleotide
  misc_feature (34)..(35): Nucleotides at these positions are non-consecutive and are separated by a non-disclosed sequence
gtgactggagttcagacgtgtgctcttccgatctagatcggaagagcgtcgtgtagggaaagagtgt

SEQ ID NO: 2323 - DNA, 92 bp, Artificial Sequence
  Description of Artificial Sequence: Synthetic oligonucleotide
  misc_feature (58)..(59): Nucleotides at these positions are non-consecutive and are separated by a non-disclosed sequence
aatgatacggcgaccaccgagatctacactctttccctacacgacgctcttccgatctagatcggaagagcacacgtctgaactccagtcac

SEQ ID NO: 2324 - DNA, 124 bp, Artificial Sequence
  Description of Artificial Sequence: Synthetic polynucleotide
  misc_feature (58)..(59): Nucleotides at these positions are non-consecutive and are separated by a non-disclosed sequence
aatgatacggcgaccaccgagatctacactctttccctacacgacgctcttccgatctagatcggaagagcacacgtctgaactccagtcacctaccaggatctcgtatgccgtcttctgcttg

SEQ ID NO: 2325 - DNA, 200 bp, Artificial Sequence
  Description of Artificial Sequence: Synthetic polynucleotide
  modified_base (5)..(24): a, c, t, g, unknown or other
  modified_base (29)..(48): a, c, t, g, unknown or other
  modified_base (53)..(72): a, c, t, g, unknown or other
  modified_base (77)..(96): a, c, t, g, unknown or other
  misc_feature (100)..(101): Nucleotides at these positions are non-consecutive and are separated by a non-disclosed capped gDNA sequence
  modified_base (105)..(124): a, c, t, g, unknown or other
  modified_base (129)..(149): a, c, t, g, unknown or other
  modified_base (153)..(172): a, c, t, g, unknown or other
  modified_base (175)..(196): a, c, t, g, unknown or other
gttgnnnnnnnnnnnnnnnnnnnngggannnnnnnnnnnnnnnnnnnngtcannnnnnnnnnnnnnnnnnnncgaannnnnnnnnnnnnnnnnnnntctgcagannnnnnnnnnnnnnnnnnnnttcgnnnnnnnnnnnnnnnnnnnntgacnnnnnnnnnnnnnnnnnnnntcccnnnnnnnnnnnnnnnnnnnncaac
